(19) United States
(12) Patent Application Publication
(10) Pub. No.: US 2021/0139906 A1
(43) Pub. Date: May 13, 2021

(54) COMPOUNDS AND METHODS FOR REDUCING SPDEF EXPRESSION

(71) Applicant: Ionis Pharmaceuticals, Inc., Carlsbad, CA (US)

(72) Inventors: Susan M. Freier, San Diego, CA (US); Huynh-Hoa Bui, San Diego, CA (US); Shuling Guo, Carlsbad, CA (US); Jeffrey R. Crosby, Carlsbad, CA (US)

(73) Assignee: Ionis Pharmaceuticals, Inc., Carlsbad, CA (US)

(21) Appl. No.: 17/147,215

(22) Filed: Jan. 12, 2021

Related U.S. Application Data
(63) Continuation of application No. PCT/US2020/059506, filed on Nov. 6, 2020.
(60) Provisional application No. 63/056,969, filed on Jul. 27, 2020.
(60) Provisional application No. 62/932,758, filed on Nov. 8, 2019.

(51) Int. Cl. C12N 15/113; C07H 21/04; A61K 9/00; A61K 47/02; A61P 11/00

(52) U.S. Cl. CPC C12N 15/113; C07H 21/04; A61K 9/0073; C12N 2310/351; A61P 11/00; C12N 2310/14; C12N 2310/3231; A61K 47/02

(57) ABSTRACT

Provided are compounds, methods, and pharmaceutical compositions for reducing the amount or activity of SPDEF RNA in a cell or subject, and in certain instances reducing the amount of SPDEF protein in a cell or subject. These compounds, methods, and pharmaceutical compositions are useful to ameliorate at least one symptom or hallmark of a disease or condition characterized by excessive mucus production or fibrosis, including cystic fibrosis, asthma, chronic obstructive pulmonary disease (COPD), pulmonary fibrosis, idiopathic pulmonary fibrosis (IPF), chronic bronchitis, rhinitis and ulcerative colitis.

### SEQUENCE LISTING

[0001] The present application is being filed along with a Sequence Listing in electronic format. The Sequence Listing is provided as a file entitled BIOL0366USC1SEQ_ST25.txt, created on Dec. 14, 2020, which is 569 kb in size. The information in the electronic format of the sequence listing is incorporated herein by reference in its entirety.

### FIELD

[0002] Provided are compounds, methods, and pharmaceutical compositions for ameliorating at least one symptom or hallmark of a disease or condition characterized by excessive mucus or fibrosis in a subject. In certain embodiments, there is excessive mucus in the nasal cavities (sinus), lung, gastrointestinal tract, or a combination thereof. Non-limiting examples of disease or conditions characterized by excessive mucus that may be treated with the compounds, methods, and pharmaceutical compositions disclosed herein are asthma, chronic obstructive pulmonary disease (COPD), chronic bronchitis, cystic fibrosis, and ulcerative colitis. Non-limiting examples of disease or conditions characterized by fibrosis that may be treated with the compounds, methods, and pharmaceutical compositions disclosed herein are pulmonary fibrosis and idiopathic pulmonary fibrosis (IPF).

### BACKGROUND

[0003] SAM Pointed Domain Containing ETS Transcription Factor (SPDEF) is a transcription factor that is critical for goblet cell differentiation in human lung tissue. SPDEF also regulates mucus production, inflammation, and airway responsiveness. SPDEF is expressed at low levels in the lung, but expression is increased when challenged with a virus or allergen. SPDEF expression is also increased in chronic lung disorders, such as cystic fibrosis, chronic bronchitis and asthma, relative to its expression in the lungs of subjects not diagnosed with such disorders. Chronic lung disorders are typically treated with bronchodilators, steroids and anti-inflammatory agents.

### SUMMARY OF THE INVENTION

[0004] Currently, there is a need for improved therapies and additional therapeutic options to treat disease or conditions characterized by excessive mucus or fibrosis. Often these disease or conditions result in dysfunction of the lungs and/or gastrointestinal tract. Non-limiting examples of such conditions include asthma, chronic obstructive pulmonary disease (COPD), cystic fibrosis, pulmonary fibrosis, idiopathic pulmonary fibrosis (IPF), and ulcerative colitis. It is therefore an object herein to provide compounds, methods, and pharmaceutical compositions for the treatment of such conditions.

[0005] Provided herein are compounds, methods and pharmaceutical compositions for reducing the amount or activity of SPDEF RNA in a cell or a subject. In general, compounds and pharmaceutical compositions comprise an oligomeric compound capable of reducing expression of SPDEF RNA. In certain embodiments, compounds, methods and pharmaceutical compositions reduce the amount or activity of SPDEF protein in a cell or a subject.

[0006] Provided herein are compounds, methods and pharmaceutical compositions for ameliorating at least one symptom or hallmark of a disease or condition characterized by excessive mucus or fibrosis in a subject. In certain embodiments, the disease or condition is cystic fibrosis. In certain embodiments, the disease or condition is a gastrointestinal condition, e.g., ulcerative colitis. In certain embodiments, the disease or condition is a pulmonary condition. Non-limiting examples of such pulmonary conditions are bronchitis, asthma, COPD, pulmonary fibrosis, idiopathic pulmonary fibrosis (IPF), pneumonia, emphysema, rhinitis, sinusitis, nasal polyposis, sinus polyposis, bronchiectasis, and sarcoidosis.

### DETAILED DESCRIPTION OF THE INVENTION

[0007] It is to be understood that both the foregoing general description and the following detailed description are exemplary and explanatory only and are not restrictive. Herein, the use of the singular includes the plural unless specifically stated otherwise. As used herein, the use of “or” means “and/or” unless stated otherwise. Furthermore, the use of the term “including” as well as other forms, such as “includes” and “included”, is not limiting. Also, terms such as “element” or “component” encompass both elements and components comprising one unit and elements and components that comprise more than one subunit, unless specifically stated otherwise.

[0008] The section headings used herein are for organizational purposes only and are not to be construed as limiting the subject matter described. All documents, or portions of documents, cited in this application, including, but not limited to, patents, patent applications, articles, books, and treatises, are hereby expressly incorporated-by-reference for the portions of the document discussed herein, as well as in their entirety.

### Definitions

[0009] Unless specific definitions are provided, the nomenclature used in connection with, and the procedures and techniques of, analytical chemistry, synthetic organic chemistry, and medicinal and pharmaceutical chemistry described herein are those well-known and commonly used in the art. Where permitted, all patents, applications, published applications and other publications and other data referred to throughout in the disclosure are incorporated by reference herein in their entirety.

[0010] Unless otherwise indicated, the following terms have the following meanings:

### Definitions

[0011] As used herein, “2′-deoxynucleoside” means a nucleoside comprising a 2′-H(H) deoxyribosyl sugar moiety. In certain embodiments, a 2′-deoxynucleoside is a 2′-β-D-deoxynucleoside and comprises a 2′-β-D-deoxyribosyl sugar moiety, which has the β-D configuration as found in naturally occurring deoxyribonucleic acids (DNA). In certain embodiments, a 2′-deoxynucleoside or nucleoside comprising an unmodified 2′-deoxyribosyl sugar moiety may comprise a modified nucleobase or may comprise an RNA nucleobase (uracil).

[0012] As used herein, “2′-MOE” or “2′-MOE sugar moiety” means a 2′-OCH₂CH₂OCH₃ group in place of the 2′-OH group of a ribosyl sugar moiety. “MOE” means methoxyethyl.

[0013] As used herein, “2′-MOE nucleoside” means a nucleoside comprising a 2′-MOE sugar moiety.

[0014] As used herein, “2′-OMe” or “2′-O-methyl sugar moiety” means a 2′-OCH₃ group in place of the 2′-OH group of a ribosyl sugar moiety.

[0015] As used herein, “2′-OMe nucleoside” means a nucleoside comprising a 2′-OMe sugar moiety.

[0016] As used herein, “2′-substituted nucleoside” means a nucleoside comprising a 2′-substituted sugar moiety. As used herein, “2′-substituted” in reference to a sugar moiety means a sugar moiety comprising at least one 2′-substituent group other than H or OH.

[0017] As used herein, “5-methyl cytosine” means a cytosine modified with a methyl group attached to the 5 position. A 5-methyl cytosine is a modified nucleobase.

[0018] As used herein, “administering” means providing a pharmaceutical agent to a subject.

[0019] As used herein, “antisense activity” means any detectable and/or measurable change attributable to the hybridization of an antisense compound to its target nucleic acid. In certain embodiments, antisense activity is a decrease in the amount or expression of a target nucleic acid or protein encoded by such target nucleic acid compared to target nucleic acid levels or target protein levels in the absence of the antisense compound.

[0020] As used herein, “antisense compound” means an oligomeric compound capable of achieving at least one antisense activity.

[0021] As used herein, “ameliorate” in reference to a treatment means improvement in at least one symptom relative to the same symptom in the absence of the treatment. In certain embodiments, amelioration is the reduction in the severity or frequency of a symptom or the delayed onset or slowing of progression in the severity or frequency of a symptom.

[0022] As used herein, “bicyclic nucleoside” or “BNA” means a nucleoside comprising a bicyclic sugar moiety.

[0023] As used herein, “bicyclic sugar” or “bicyclic sugar moiety” means a modified sugar moiety comprising two rings, wherein the second ring is formed via a bridge connecting two of the atoms in the first ring thereby forming a bicyclic structure. In certain embodiments, the first ring of the bicyclic sugar moiety is a furanosyl moiety. In certain embodiments, the bicyclic sugar moiety does not comprise a furanosyl moiety.

[0024] As used herein, “cleavable moiety” means a bond or group of atoms that is cleaved under physiological conditions, for example, inside a cell or a subject.

[0025] As used herein, “complementary” in reference to an oligonucleotide means that at least 70% of the nucleobases of the oligonucleotide or one or more regions thereof and the nucleobases of another nucleic acid or one or more regions thereof are capable of hydrogen bonding with one another when the nucleobase sequence of the oligonucleotide and the other nucleic acid are aligned in opposing directions. As used herein, “complementary nucleobases” means nucleobases that are capable of forming hydrogen bonds with one another. Complementary nucleobase pairs include adenine (A) with thymine (T), adenine (A) with uracil (U), cytosine (C) with guanine (G), and 5-methyl cytosine (mC) with guanine (G). Complementary oligonucleotides and/or nucleic acids need not have nucleobase complementarity at each nucleoside. Rather, some mismatches are tolerated. As used herein, “fully complementary” or “100% complementary” in reference to an oligonucleotide, or portion thereof, means that oligonucleotide, or portion thereof, is complementary to another oligonucleotide or nucleic acid at each nucleobase of the oligonucleotide.

[0026] As used herein, “conjugate group” means a group of atoms that is directly or indirectly attached to an oligonucleotide. Conjugate groups include a conjugate moiety and a conjugate linker that attaches the conjugate moiety to the oligonucleotide.

[0027] As used herein, “conjugate linker” means a single bond or a group of atoms comprising at least one bond that connects a conjugate moiety to an oligonucleotide.

[0028] As used herein, “conjugate moiety” means a group of atoms that is attached to an oligonucleotide via a conjugate linker.

[0029] As used herein, “contiguous” in the context of an oligonucleotide refers to nucleosides, nucleobases, sugar moieties, or internucleoside linkages that are immediately adjacent to each other. For example, “contiguous nucleobases” means nucleobases that are immediately adjacent to each other in a sequence.

[0030] As used herein, “constrained ethyl” or “cEt” or “cEt modified sugar” means a β-D ribosyl bicyclic sugar moiety wherein the second ring of the bicyclic sugar is formed via a bridge connecting the 4′-carbon and the 2′-carbon of the β-D ribosyl sugar moiety, wherein the bridge has the formula 4′-CH(CH₃)—O-2′, and wherein the methyl group of the bridge is in the S configuration.

[0031] As used herein, “cEt nucleoside” means a nucleoside comprising cEt modified sugar moiety.

[0032] As used herein, “chirally enriched population” means a plurality of molecules of identical molecular formula, wherein the number or percentage of molecules within the population that contain a particular stereochemical configuration at a particular chiral center is greater than the number or percentage of molecules expected to contain the same particular stereochemical configuration at the same particular chiral center within the population if the particular chiral center were stereorandom. Chirally enriched populations of molecules having multiple chiral centers within each molecule may contain one or more stereorandom chiral centers. In certain embodiments, the molecules are modified oligonucleotides. In certain embodiments, the molecules are compounds comprising modified oligonucleotides.

[0033] As used herein, “double-stranded” refers to a region of hybridized nucleic acid(s). In certain embodiments, such double-strand results from hybridization of an oligonucleotide (or portion thereof) to a target region of a transcript. In certain embodiments, a double-strand results from hybridization of two oligonucleotides (or portions thereof) to one another. In certain embodiments, the hybridized regions are portions (including the entirety) of two separate molecules (e.g., no covalent bond connects the two complementary strands together). In certain embodiments, the hybridized regions are portions of the same molecule that have hybridized (e.g., a hairpin structure).

[0034] As used herein, “duplex” means a structure formed by two separate nucleic acid molecules at least a portion of which are complementary and that are hybridized to one another, but are not covalently bonded to one another.

[0035] As used herein, “gapmer” means a modified oligonucleotide comprising an internal region having a plurality of nucleosides that support RNase H cleavage positioned between external regions having one or more nucleosides, wherein the nucleosides comprising the internal region are chemically distinct from the nucleoside or nucleosides comprising the external regions. The internal region may be referred to as the “gap” and the external regions may be referred to as the “wings.” Unless otherwise indicated, “gapmer” refers to a sugar motif Unless otherwise indicated, the sugar moiety of each nucleoside of the gap is a 2′-β-D-deoxyribosyl sugar moiety. Thus, the term “cEt gapmer” indicates a gapmer having a gap comprising 2′-β-D-deoxynucleosides and wings comprising a cEt nucleoside. Unless otherwise indicated, a cEt gapmer may comprise one or more modified internucleoside linkages and/or modified nucleobases and such modifications do not necessarily follow the gapmer pattern of the sugar modifications.

[0036] As used herein, “hotspot region” is a range of nucleobases on a target nucleic acid that is amenable to oligomeric compound-mediated reduction of the amount or activity of the target nucleic acid.

[0037] As used herein, “hybridization” means the pairing or annealing of complementary oligonucleotides and/or nucleic acids. While not limited to a particular mechanism, the most common mechanism of hybridization involves hydrogen bonding, which may be Watson-Crick, Hoogsteen or reversed Hoogsteen hydrogen bonding, between complementary nucleobases.

[0038] As used herein, “internucleoside linkage” means the covalent linkage between contiguous nucleosides in an oligonucleotide. As used herein “modified internucleoside linkage” means any internucleoside linkage other than a phosphodiester internucleoside linkage. “Phosphorothioate internucleoside linkage” is a modified internucleoside linkage in which one of the non-bridging oxygen atoms of a phosphodiester internucleoside linkage is replaced with a sulfur atom.

[0039] As used herein, “inverted nucleoside” means a nucleotide having a 3′ to 3′ and/or 5′ to 5′ internucleoside linkage, as shown herein.

[0040] As used herein, “inverted sugar moiety” means the sugar moiety of an inverted nucleoside or an abasic sugar moiety having a 3′ to 3′ and/or 5′ to 5′ internucleoside linkage.

[0041] As used herein, “linker-nucleoside” means a nucleoside that links, either directly or indirectly, an oligonucleotide to a conjugate moiety. Linker-nucleosides are located within the conjugate linker of an oligomeric compound. Linker-nucleosides are not considered part of the oligonucleotide portion of an oligomeric compound even if they are contiguous with the oligonucleotide.

[0042] “Lipid nanoparticle” or “LNP” is a vesicle comprising a lipid layer encapsulating a pharmaceutically active molecule, such as a nucleic acid molecule, e.g., an RNAi or a plasmid from which an RNAi is transcribed. LNPs are described in, for example, U.S. Pat. Nos. 6,858,225, 6,815,432, 8,158,601, and 8,058,069, the entire contents of which are hereby incorporated herein by reference.

[0043] As used herein, “non-bicyclic modified sugar moiety” means a modified sugar moiety that comprises a modification, such as a substituent, that does not form a bridge between two atoms of the sugar to form a second ring.

[0044] As used herein, “mismatch” or “non-complementary” means a nucleobase of a first oligonucleotide that is not complementary with the corresponding nucleobase of a second oligonucleotide or target nucleic acid when the first and second oligonucleotide are aligned.

[0045] As used herein, “motif” means the pattern of unmodified and/or modified sugar moieties, nucleobases, and/or internucleoside linkages, in an oligonucleotide.

[0046] As used herein, “nucleobase” means an unmodified nucleobase or a modified nucleobase. As used herein an “unmodified nucleobase” is adenine (A), thymine (T), cytosine (C), uracil (U), or guanine (G). As used herein, a “modified nucleobase” is a group of atoms other than unmodified A, T, C, U, or G capable of pairing with at least one unmodified nucleobase. A “5-methyl cytosine” is a modified nucleobase. A universal base is a modified nucleobase that can pair with any one of the five unmodified nucleobases. As used herein, “nucleobase sequence” means the order of contiguous nucleobases in a nucleic acid or oligonucleotide independent of any sugar or internucleoside linkage modification.

[0047] As used herein, “nucleoside” means a compound comprising a nucleobase and a sugar moiety. The nucleobase and sugar moiety are each, independently, unmodified or modified. As used herein, “modified nucleoside” means a nucleoside comprising a modified nucleobase and/or a modified sugar moiety. Modified nucleosides include abasic nucleosides, which lack a nucleobase. “Linked nucleosides” are nucleosides that are connected in a contiguous sequence (i.e., no additional nucleosides are presented between those that are linked).

[0048] As used herein, “overhang” refers to unpaired nucleotides at either or both ends of a duplex formed by hybridization of an antisense RNAi oligonucleotide and a sense RNAi oligonucleotide.

[0049] As used herein, “oligomeric compound” means an oligonucleotide and optionally one or more additional features, such as a conjugate group or terminal group. An oligomeric compound may be paired with a second oligomeric compound that is complementary to the first oligomeric compound or may be unpaired. A “singled-stranded oligomeric compound” is an unpaired oligomeric compound. The term “oligomeric duplex” means a duplex formed by two oligomeric compounds having complementary nucleobase sequences. Each oligomeric compound of an oligomeric duplex may be referred to as a “duplexed oligomeric compound.”

[0050] As used herein, “oligonucleotide” means a strand of linked nucleosides connected via internucleoside linkages, wherein each nucleoside and internucleoside linkage may be modified or unmodified. Unless otherwise indicated, oligonucleotides consist of 8-50 linked nucleosides. As used herein, “modified oligonucleotide” means an oligonucleotide, wherein at least one nucleoside or internucleoside linkage is modified. As used herein, “unmodified oligonucleotide” means an oligonucleotide that does not comprise any nucleoside modifications or internucleoside modifications.

[0051] As used herein, “pharmaceutically acceptable carrier or diluent” means any substance suitable for use in administering to a subject. Certain such carriers enable pharmaceutical compositions to be formulated as, for example, tablets, pills, dragees, capsules, liquids, gels, syrups, slurries, suspension and lozenges for the oral ingestion by a subject. In certain embodiments, a pharmaceutically acceptable carrier or diluent is sterile water, sterile saline, sterile buffer solution or sterile artificial cerebrospinal fluid.

[0052] As used herein “pharmaceutically acceptable salts” means physiologically and pharmaceutically acceptable salts of compounds. Pharmaceutically acceptable salts retain the desired biological activity of the parent compound and do not impart undesired toxicological effects thereto.

[0053] As used herein “pharmaceutical composition” means a mixture of substances suitable for administering to a subject. For example, a pharmaceutical composition may comprise an oligomeric compound and a sterile aqueous solution. In certain embodiments, a pharmaceutical composition shows activity in a free uptake assay in certain cell lines.

[0054] As used herein “prodrug” means a therapeutic agent in a form outside the body that is converted to a different form within a subject or cells thereof. Typically, conversion of a prodrug within the subject is facilitated by the action of an enzymes (e.g., endogenous or viral enzyme) or chemicals present in cells or tissues and/or by physiologic conditions.

[0055] As used herein, “reducing or inhibiting the amount or activity” refers to a reduction or blockade of the transcriptional expression or activity relative to the transcriptional expression or activity in an untreated or control sample and does not necessarily indicate a total elimination of transcriptional expression or activity.

[0056] As used herein, “RNA” means an RNA transcript and includes pre-mRNA and mature mRNA unless otherwise specified.

[0057] As used herein, “RNAi compound” means an antisense compound that acts, at least in part, through RISC or Ago2 to modulate a target nucleic acid and/or protein encoded by a target nucleic acid. RNAi compounds include, but are not limited to double-stranded siRNA, single-stranded RNA (ssRNA), and microRNA, including microRNA mimics. In certain embodiments, an RNAi compound modulates the amount, activity, and/or splicing of a target nucleic acid. The term RNAi compound excludes antisense compounds that act through RNase H.

[0058] As used herein, “RNAi oligonucleotide” means an antisense RNAi oligonucleotide or a sense RNAi oligonucleotide.

[0059] As used herein, “antisense RNAi oligonucleotide” means an oligonucleotide comprising a region that is complementary to a target sequence, and which includes at least one chemical modification suitable for RNAi.

[0060] As used herein, “sense RNAi oligonucleotide” means an oligonucleotide comprising a region that is complementary to a region of an antisense RNAi oligonucleotide, and which is capable of forming a duplex with such antisense RNAi oligonucleotide. A duplex formed by an antisense RNAi oligonucleotide and a sense RNAi oligonucleotide is referred to as a double-stranded RNAi compound (dsRNAi) or a short interfering RNA (siRNA).

[0061] As used herein, “antisense RNase H oligonucleotide” means an oligonucleotide comprising a region that is complementary to a target sequence, and which includes at least one chemical modification suitable for RNase H-mediated nucleic acid reduction.

[0062] As used herein, “self-complementary” in reference to an oligonucleotide means an oligonucleotide that at least partially hybridizes to itself.

[0063] As used herein, “stabilized phosphate group” means a 5′-phosphate analog that is metabolically more stable than a 5′-phosphate as naturally occurs on DNA or RNA.

[0064] As used herein, “standard cell assay” means the assay described in Example 1 and reasonable variations thereof.

[0065] As used herein, “stereorandom” in the context of a population of molecules of identical molecular formula means a chiral center having a random stereochemical configuration. For example, in a population of molecules comprising a stereorandom chiral center, the number of molecules having the (S) configuration of the stereorandom chiral center may be but is not necessarily the same as the number of molecules having the (R) configuration of the stereorandom chiral center. The stereochemical configuration of a chiral center is considered random when it is the result of a synthetic method that is not designed to control the stereochemical configuration. In certain embodiments, a stereorandom chiral center is a stereorandom phosphorothioate internucleoside linkage.

[0066] As used herein, “subject” means a human or non-human animal. In certain embodiments, the subject is a human.

[0067] As used herein, “sugar moiety” means an unmodified sugar moiety or a modified sugar moiety. As used herein, “unmodified sugar moiety” means a 2′-OH(H) ribosyl moiety, as found in RNA (an “unmodified RNA sugar moiety”), or a 2′-H(H) deoxyribosyl moiety, as found in DNA (an “unmodified DNA sugar moiety”). Unmodified sugar moieties have one hydrogen at each of the 1′, 3′, and 4′ positions, an oxygen at the 3′ position, and two hydrogens at the 5′ position. As used herein, “modified sugar moiety” or “modified sugar” means a modified furanosyl sugar moiety or a sugar surrogate.

[0068] As used herein, “sugar surrogate” means a modified sugar moiety having other than a furanosyl moiety that can link a nucleobase to another group, such as an internucleoside linkage, conjugate group, or terminal group in an oligonucleotide. Modified nucleosides comprising sugar surrogates can be incorporated into one or more positions within an oligonucleotide and such oligonucleotides are capable of hybridizing to complementary oligomeric compounds or nucleic acids.

[0069] As used herein, “symptom or hallmark” means any physical feature or test result that indicates the existence or extent of a disease or disorder. In certain embodiments, a symptom is apparent to a subject or to a medical professional examining or testing said subject. In certain embodiments, a hallmark is apparent upon invasive diagnostic testing, including, but not limited to, post-mortem tests.

[0070] As used herein, “target nucleic acid” and “target RNA” mean a nucleic acid that an antisense compound is designed to affect. In certain embodiments, the target RNA is a SPDEF RNA, and the nucleic acid is a SPDEF nucleic acid.

[0071] As used herein, “target region” means a portion of a target nucleic acid to which an oligomeric compound is designed to hybridize.

[0072] As used herein, “terminal group” means a chemical group or group of atoms that is covalently linked to a terminus of an oligonucleotide.

[0073] As used herein, “therapeutically effective amount” means an amount of a pharmaceutical agent that provides a therapeutic benefit to a subject. For example, a therapeutically effective amount improves a symptom or hallmark of a disease.

### Certain Embodiments

[0074] The present disclosure provides the following non-limiting numbered embodiments:

Embodiment 1. An oligomeric compound comprising a modified oligonucleotide consisting of 12 to 50, 12 to 45, 12 to 40, 12 to 35, 12 to 30, 12 to 25, or 12 to 20 linked nucleosides, wherein the nucleobase sequence of the modified oligonucleotide is at least 90% complementary to an equal length portion of an SPDEF nucleic acid, and wherein the modified oligonucleotide comprises at least one modification selected from a modified sugar moiety and a modified internucleoside linkage.
Embodiment 2. An oligomeric compound comprising a modified oligonucleotide consisting of 12 to 50, 12 to 45, 12 to 40, 12 to 35, 12 to 30, 12 to 25, or 12 to 20 linked nucleosides and having a nucleobase sequence comprising at least 8, 9, 10, 11, 12, 13, 14, 15, 16, 17, 18, 19, or 20 contiguous nucleobases complementary to an equal length portion of the nucleobase sequence of any of SEQ ID NOS: 1-5.
Embodiment 3. An oligomeric compound comprising a modified oligonucleotide consisting of 12 to 50, 12 to 45, 12 to 40, 12 to 35, 12 to 30, 12 to 25, or 12 to 20 linked nucleosides and having a nucleobase sequence comprising at least 8, at least 9, at least 10, at least 11, at least 12, at least 13, at least 14, at least 15, at least 16, at least 17, at least 18, at least 19, or at least 20 contiguous nucleobases complementary to: an equal length portion of nucleobases 3521-3554 of SEQ ID NO: 2; an equal length portion of nucleobases 3684-3702 of SEQ ID NO: 2; an equal length portion of nucleobases 3785-3821 of SEQ ID NO: 2; an equal length portion of nucleobases 6356-6377 of SEQ ID NO: 2; an equal length portion of nucleobases 8809-8826 of SEQ ID NO: 2; an equal length portion of nucleobases 9800-9817 of SEQ ID NO: 2; an equal length portion of nucleobases 14212-14231 of SEQ ID NO: 2; an equal length portion of nucleobases 15385-15408 of SEQ ID NO: 2; an equal length portion of nucleobases 17289-17307 of SEQ ID NO: 2; or an equal length portion of nucleobases 17490-17509 of SEQ ID NO: 2.
Embodiment 4. The oligomeric compound of embodiment 3, wherein the modified oligonucleotide comprises at least 8, at least 9, at least 10, at least 11, at least 12, at least 13, at least 14, at least 15, at least 16, at least 17, at least 18, at least 19, or at least 20 contiguous nucleobases of a sequence selected from: SEQ ID NOS: 1053, 1129, 2166, 2167, 2168, 2169, 2170, 2171, 2172, 2173, 2174, 2175, 2176, 2242, and 2247; SEQ ID NOS: 1777, 1852, 1928, and 2004; SEQ ID NOS: 1282, 1358, 1434, 2177, 2178, 2179, 2180, 2181, 2182, 2183, 2184, 2185, and 2186; SEQ ID NOS: 678, 2198, 2199, 2200, 2244, and 2248; SEQ ID NOS: 683, 1715, and 2245; SEQ ID NOS: 761, 2229, and 2230; SEQ ID NOS: 1606, 1682, 2255, 2275, and 2280; SEQ ID NOS: 999, 1075, 2262, 2263, 2264, 2265, 2266, 2267, and 2268; SEQ ID NOS: 163, 1980, 2056, and 2277; or SEQ ID NOS: 1831, 1907, 1983, 2059, and 2282.
Embodiment 5. The oligomeric compound of any one of embodiments 1-4, wherein the modified oligonucleotide has a nucleobase sequence that is at least 80%, 85%, 90%, 95%, or 100% complementary to an equal length portion of a nucleobase sequence selected from SEQ ID NOS: 1-5 when measured across the entire nucleobase sequence of the modified oligonucleotide.
Embodiment 6. The oligomeric compound of any one of embodiments 1-5, wherein at least one modified nucleoside comprises a modified sugar moiety.
Embodiment 7. The oligomeric compound of embodiment 6, wherein the modified sugar moiety comprises a bicyclic sugar moiety.
Embodiment 8. The oligomeric compound of embodiment 7, wherein the bicyclic sugar moiety comprises a 2′-4′ bridge selected from —O—CH2-; and —O—CH(CH3)-.
Embodiment 9. The oligomeric compound of embodiment 6, wherein the modified sugar moiety comprises a non-bicyclic modified sugar moiety.
Embodiment 10. The oligomeric compound of embodiment 9, wherein the non-bicyclic modified sugar moiety comprises a 2′-MOE sugar moiety or 2′-OMe sugar moiety.
Embodiment 11. The oligomeric compound of any one of embodiments 1-5, wherein at least one modified nucleoside comprises a sugar surrogate.
Embodiment 12. The oligomeric compound of embodiment 11, wherein the sugar surrogate is selected from morpholino and PNA.
Embodiment 13. The oligomeric compound of any of embodiments 1-12, wherein the modified oligonucleotide has a sugar motif comprising: a 5′-region consisting of 1-5 linked 5′-region nucleosides; a central region consisting of 6-10 linked central region nucleosides; and a 3′-region consisting of 1-5 linked 3′-region nucleosides; wherein each of the 5′-region nucleosides and each of the 3′-region nucleosides comprises a modified sugar moiety and each of the central region nucleosides comprises an unmodified 2′-deoxyribosyl sugar moiety.
Embodiment 14. The oligomeric compound of any one of embodiments 1-13, wherein the modified oligonucleotide comprises at least one modified internucleoside linkage.
Embodiment 15. The oligomeric compound of embodiment 14, wherein the modified internucleoside linkage is a phosphorothioate internucleoside linkage.
Embodiment 16. The oligomeric compound of embodiment 14, wherein each internucleoside linkage of the modified oligonucleotide is a modified internucleoside linkage.
Embodiment 17. The oligomeric compound of any one of embodiments 1-13, wherein each internucleoside linkage of the modified oligonucleotide is a phosphorothioate internucleoside linkage.
Embodiment 18. The oligomeric compound of any one of embodiments 1-13, wherein the modified oligonucleotide comprises at least one phosphodiester internucleoside linkage.
Embodiment 19. The oligomeric compound of embodiment 14, wherein each internucleoside linkage is independently selected from a phosphodiester internucleoside linkage or a phosphorothioate internucleoside linkage.
Embodiment 20. The oligomeric compound of any of embodiments 1-19, wherein the modified oligonucleotide comprises at least one modified nucleobase.
Embodiment 21. The oligomeric compound of embodiment 20, wherein the modified nucleobase is a 5-methyl cytosine.
Embodiment 22. The oligomeric compound of any of embodiments 1-21, wherein the modified oligonucleotide consists of 12-30, 12-22, 12-20, 14-20, 15-25, 16-20, 18-22 or 18-20 linked nucleosides.
Embodiment 23. The oligomeric compound of any of embodiments 1-22, wherein the modified oligonucleotide consists of 16 linked nucleosides.
Embodiment 24. The oligomeric compound of embodiment 23, wherein each of nucleosides 1-3 and 14-16 (from 5′ to 3′) comprise a cEt modification and each of nucleosides 4-13 are 2′-deoxynucleosides.
Embodiment 25. The oligomeric compound of embodiment 23, wherein each of nucleosides 1-2 and 15-16 (from 5′ to 3′) comprise a cEt modification and each of nucleosides 3-14 are 2′-deoxynucleosides.
Embodiment 26. The oligomeric compound of any of embodiments 1-25, consisting of the modified oligonucleotide.
Embodiment 27. The oligomeric compound of any of embodiments 1-25, comprising a conjugate group comprising a conjugate moiety and a conjugate linker.
Embodiment 28. The oligomeric compound of embodiment 27, wherein the conjugate group comprises a GalNAc cluster comprising 1-3 GalNAc ligands.
Embodiment 29. The oligomeric compound of embodiments 27 or 28, wherein the conjugate linker consists of a single bond.
Embodiment 30. The oligomeric compound of embodiment 27, wherein the conjugate linker is cleavable.
Embodiment 31. The oligomeric compound of embodiment 30, wherein the conjugate linker comprises 1-3 linker-nucleosides.
Embodiment 32. The oligomeric compound of any of embodiments 27-31, wherein the conjugate group is attached to the modified oligonucleotide at the 5′-end of the modified oligonucleotide.
Embodiment 33. The oligomeric compound of any of embodiments 27-31, wherein the conjugate group is attached to the modified oligonucleotide at the 3′-end of the modified oligonucleotide.
Embodiment 34. The oligomeric compound of any of embodiments 1-33 comprising a terminal group.
Embodiment 35. The oligomeric compound of any of embodiments 1-34 wherein the oligomeric compound is a single-stranded oligomeric compound.
Embodiment 36. The oligomeric compound of any of embodiments 1-30 or 32-35, wherein the oligomeric compound does not comprise linker-nucleosides.
Embodiment 37. An oligomeric duplex comprising an oligomeric compound of any of embodiments 1-34 or 36.
Embodiment 38. An antisense compound comprising or consisting of an oligomeric compound of any of embodiments 1-36 or an oligomeric duplex of embodiment 37.
Embodiment 39. A modified oligonucleotide according to the following chemical structure:

[chemical structure]

Embodiment 40. A modified oligonucleotide according to the following chemical structure:

[chemical structure]

Embodiment 41. A modified oligonucleotide according to the following chemical structure:

[chemical structure]

[0075] or a salt thereof.

Embodiment 42. A modified oligonucleotide according to the following chemical structure:

[chemical structure]

[0076] or a salt thereof.

Embodiment 43. The modified oligonucleotide of embodiment 41 or 42, which is a sodium salt.
Embodiment 44. A modified oligonucleotide according to the following chemical structure:

[chemical structure]

Embodiment 45. A modified oligonucleotide according to the following chemical notation:
[0077] mCks Aks Aks Tds Ads Ads Gds mCds Ads Ads Gds Tds mCds Tks Gks Gks; wherein
   [0078] A=an adenine nucleobase
   [0079] mC=a 5′-methyl cytosine nucleobase
   [0080] G=a guanine nucleobase
   [0081] T=a thymine nucleobase
   [0082] k=a cEt modified sugar
   [0083] d=a 2′-deoxyribose sugar, and
   [0084] s=a phosphorothioate internucleoside linkage.
      Embodiment 46. A modified oligonucleotide according to the following chemical notation:
[0085] Aks mCks Tds Tds Gds Tds Ads Ads mCds Ads Gds Tes Ges Ges Tks Tk; wherein
   [0086] A=an adenine nucleobase
   [0087] mC=a 5′-methyl cytosine nucleobase
   [0088] G=a guanine nucleobase
   [0089] T=a thymine nucleobase
   [0090] k=a cEt modified sugar
   [0091] d=a 2′-deoxyribose sugar, and
   [0092] s=a phosphorothioate internucleoside linkage.
      Embodiment 47. A pharmaceutical composition comprising the oligomeric compound of any of embodiments 1-36, the oligomeric duplex of embodiment 37, the antisense compound of embodiment 38, or the modified oligonucleotides of any one of embodiments 39-46; and a pharmaceutically acceptable carrier or diluent.
      Embodiment 48. The pharmaceutical composition of embodiment 47, wherein the pharmaceutically acceptable carrier or diluent comprises phosphate buffered saline.
      Embodiment 49. The pharmaceutical composition of embodiment 48, consisting essentially of the oligomeric compound, antisense compound or oligomeric duplex, and phosphate buffered saline.
      Embodiment 50. A method comprising administering to a subject the oligomeric compound of any of embodiments 1-36, the oligomeric duplex of embodiment 37, the antisense compound of embodiment 38, the modified oligonucleotides of any one of embodiments 39-46, or the pharmaceutical composition of any of embodiments 47-49.
      Embodiment 51. A method of treating a pulmonary condition comprising administering to a subject having or at risk for developing the pulmonary condition a therapeutically effective amount of the oligomeric compound of any of embodiments 1-36, the oligomeric duplex of embodiment 37, the antisense compound of embodiment 38, the modified oligonucleotides of any one of embodiments 39-46, or the pharmaceutical composition according to any of embodiments 47-49, thereby treating the pulmonary condition.
      Embodiment 52. A method of reducing SPDEF RNA or SPDEF protein in a lung of a subject having or at risk for developing a pulmonary condition comprising administering a therapeutically effective amount of the oligomeric compound of any of embodiments 1-36, the oligomeric duplex of embodiment 37, the antisense compound of embodiment 38, the modified oligonucleotides of any one of embodiments 39-46, or the pharmaceutical composition according to any of embodiments 47-49, thereby reducing SPDEF RNA or SPDEF protein in the lung.
      Embodiment 53. The method of embodiment 51 or 52, wherein the pulmonary condition is selected from bronchitis, asthma, chronic obstructive pulmonary disease, pulmonary fibrosis, idiopathic pulmonary fibrosis (IPF), pneumonia, emphysema, rhinitis, sinusitis, nasal polyposis, sinus polyposis, bronchiectasis, and sarcoidosis.
      Embodiment 54. The method of embodiment 51 or 52, wherein the pulmonary condition is chronic bronchitis.
      Embodiment 55. The method of embodiment 51 or 52, wherein the pulmonary condition is severe asthma.
      Embodiment 56. The method of any one of embodiments 51-55, wherein the administering comprises administering via nebulizer or inhaler.
      Embodiment 57. The method of any one of embodiments 51-56, wherein at least one symptom or hallmark of the pulmonary condition is ameliorated.
      Embodiment 58. The method of embodiment 57, wherein the symptom or hallmark is selected from shortness of breath, chest pain, coughing, wheezing, fatigue, and sleep disruption.
      Embodiment 59. The method of any of embodiments 51-58, wherein the method prevents or slows disease progression.
      Embodiment 60. A method of reducing mucus production in the lungs of a subject, the method comprising administering the oligomeric compound of any of embodiments 1-36, the oligomeric duplex of embodiment 37, the antisense compound of embodiment 38, the modified oligonucleotides of any one of embodiments 39-46; or the pharmaceutical composition of any one of embodiments 47-49.
      Embodiment 61. The method of any one of embodiments 50-60, wherein administering comprises oral delivery or nasal delivery.
      Embodiment 62. The method of any one of embodiments 50-61, wherein administering comprises aerosolized delivery.
      Embodiment 63. Use of the oligomeric compound of any of embodiments 1-36, the oligomeric duplex of embodiment 37, the antisense compound of embodiment 38, the modified oligonucleotides of any one of embodiments 39-46; or the pharmaceutical composition of any one of embodiments 47-49 for the treatment of a pulmonary condition.
      Embodiment 64. The use of embodiment 60, wherein the pulmonary condition is selected from bronchitis, asthma, chronic obstructive pulmonary disease, pneumonia, emphysema, rhinitis, sinusitis, nasal polyposis, sinus polyposis, bronchiectasis, and sarcoidosis.
      Embodiment 65. The use of embodiment 63, wherein the pulmonary condition is chronic bronchitis.
      Embodiment 66. The use of embodiment 63, wherein the pulmonary condition is severe asthma.
      Embodiment 67. A method of reducing mucus production in the gastrointestinal tract of a subject, the method comprising administering the oligomeric compound of any of embodiments 1-36, the oligomeric duplex of embodiment 37, the antisense compound of embodiment 38, the modified oligonucleotides of any one of embodiments 39-46; or the pharmaceutical composition of any one of embodiments 47-49.
      Embodiment 68. A method of treating a gastrointestinal condition comprising administering to a subject having or at risk for developing the gastrointestinal condition a therapeutically effective amount of the pharmaceutical composition according to any of embodiments 47-49, thereby treating the gastrointestinal condition.
      Embodiment 69. A method of reducing SPDEF RNA or SPDEF protein in the gastrointestinal tract of a subject having or at risk for developing a gastrointestinal condition, the method comprising administering a therapeutically effective amount of the pharmaceutical composition according to any of embodiments 47-49, thereby reducing SPDEF RNA or SPDEF protein in the gastrointestinal tract.
      Embodiment 70. The method of embodiment 68 or 69, wherein the gastrointestinal condition is ulcerative colitis.
      Embodiment 71. A method of reducing inflammation in a subject in need thereof, wherein the method comprises administering a therapeutically effective amount of the oligomeric compound of any of claims 1-36, the oligomeric duplex of claim 37, the antisense compound of claim 38, or the modified oligonucleotides of any one of claims 39-46, or the pharmaceutical composition of any one of claim 47-49.
      Embodiment 72. The method of claim 71, wherein administering reduces inflammation in a lung of the subject.
      Embodiment 73. The method of claim 71, wherein administering reduces inflammation in the gastrointestinal tract of the subject.
      Embodiment 74. A system for treating a pulmonary condition comprising: a nebulizer or an inhaler; the oligomeric compound of any one of embodiments 1-36, the oligomeric duplex of embodiment 37, the antisense compound of embodiment 38, or the modified oligonucleotide of any one of embodiments 39-46; and a pharmaceutically acceptable carrier or diluent.
      Embodiment 75. An oligomeric compound comprising a modified oligonucleotide consisting of 12 to 30 linked nucleosides, wherein the nucleobase sequence of the modified oligonucleotide comprises at least 12, 13, 14, 15, 16, 17, 18, 19, 20, 21, 22 or 23 nucleobases of any of SEQ ID NOS: 2324-2510; wherein the modified oligonucleotide comprises at least one modification selected from a modified sugar and a modified internucleoside linkage.
      Embodiment 76. An oligomeric compound comprising a modified oligonucleotide consisting of 12 to 30 linked nucleosides wherein the nucleobase sequence of the modified oligonucleotide is complementary to at least 8, at least 9, at least 10, at least 11, at least 12, at least 13, at least 14, at least 15, at least 16, at least 17, at least 18, at least 19, at least 20, or at least 21 contiguous nucleobases of:

[0093] an equal length portion of nucleobases 19600-19642 of SEQ ID NO: 2; or

[0094] an equal length portion of nucleobases 19640-19672 of SEQ ID NO: 2.

Embodiment 77. An oligomeric compound comprising a modified oligonucleotide consisting of 12 to 30 linked nucleosides and having a nucleobase sequence comprising at least 8, at least 9, at least 10, at least 11, at least 12, at least 13, at least 14, at least 15, at least 16, at least 17, at least 18, at least 19, at least 20, at least 21, at least 22 or at least 23 contiguous nucleobases of:

[0095] SEQ ID NOS: 2670, 2582, and 2677; or

[0096] SEQ ID NOS: 2609, 2606, and 2578.

Embodiment 78. The oligomeric compound of any of embodiments 75-77, wherein the oligomeric compound comprises an antisense RNAi oligonucleotide comprising a targeting region comprising at least 15 contiguous nucleobases, wherein the targeting region is at least 90% complementary to an equal-length portion of a SPDEF RNA.
Embodiment 79. The oligomeric compound of embodiment 78, wherein the targeting region of the antisense RNAi oligonucleotide is at least 95% complementary or is 100% complementary to the equal length portion of a SPDEF RNA.
Embodiment 80. The oligomeric compound of any of embodiments 78 or 79, wherein the targeting region of the antisense RNAi oligonucleotide comprises at least 19, 20, 21, or 25 contiguous nucleobases.
Embodiment 81. The oligomeric compound of any of embodiments 78-80, wherein the SPDEF RNA has the nucleobase sequence of any of SEQ ID NOs: 1-6.
Embodiment 82. The oligomeric compound of any of embodiments 78-81 wherein at least one nucleoside of the antisense RNAi oligonucleotide comprises a modified sugar moiety selected from: 2′-F, 2′-OMe, 2′-NMA, LNA, and cEt; or a sugar surrogate selected from GNA, and UNA.
Embodiment 83. The oligomeric compound of any of embodiments 78-82, wherein each nucleoside of the antisense RNAi oligonucleotide comprises a modified sugar moiety or a sugar surrogate.
Embodiment 84. The oligomeric compound of any of embodiments 78-83 wherein at least 80%, at least 90%, or 100% of the nucleosides of the antisense RNAi oligonucleotide comprises a modified sugar moiety selected from 2′-F and 2′-OMe.
Embodiment 85. The oligomeric compound of any of embodiments 78-84, comprising a stabilized phosphate group attached to the 5′ position of the 5′-most nucleoside of the antisense RNAi oligonucleotide.
Embodiment 86. The oligomeric compound of embodiment 85, wherein the stabilized phosphate group comprises a cyclopropyl phosphonate or an (E)-vinyl phosphonate.
Embodiment 87. The oligomeric compound of any of embodiments 78-86, consisting of the RNAi antisense oligonucleotide.
Embodiment 88. The oligomeric compound of any of embodiments 78-87, comprising a conjugate group comprising a conjugate moiety and a conjugate linker.
Embodiment 89. The oligomeric compound of embodiment 88, wherein the conjugate linker consists of a single bond.
Embodiment 90. The oligomeric compound of embodiment 88, wherein the conjugate linker is cleavable.
Embodiment 91. The oligomeric compound of embodiment 88, wherein the conjugate linker comprises 1-3 linker-nucleosides.
Embodiment 92. The oligomeric compound of any of embodiments 88-91, wherein the conjugate group is attached to the 5′-end of the antisense RNAi oligonucleotide.
Embodiment 93. The oligomeric compound of any of embodiments 88-91, wherein the conjugate group is attached to the 3′-end of the antisense RNAi oligonucleotide.
Embodiment 94. The oligomeric compound of any of embodiments 78-93, comprising a terminal group.
Embodiment 95. The oligomeric compound of any of embodiments 75-90, 92 and 93, wherein the oligomeric compound does not comprise linker-nucleosides.
Embodiment 96. An oligomeric duplex comprising the oligomeric compound of any one of embodiments 75-95.
Embodiment 97. The oligomeric duplex of embodiment 96, wherein the oligomeric complex is an RNAi compound.
Embodiment 98. The oligomeric duplex of embodiment 96 or 97, comprising a sense RNAi oligonucleotide consisting of 17 to 30 linked nucleosides, wherein the nucleobase sequence of the sense RNAi oligonucleotide comprises an antisense-hybridizing region comprising least 15 contiguous nucleobases wherein the antisense-hybridizing region is at least 90% complementary to an equal length portion of the antisense RNAi oligonucleotide.
Embodiment 99. The oligomeric duplex of embodiment 98, wherein the sense RNAi oligonucleotide consists of 18-25, 20-25, or 21-23 linked nucleosides.
Embodiment 100. The oligomeric duplex of embodiment 98, wherein the sense RNAi oligonucleotide consists of 21 or 23 linked nucleosides.
Embodiment 101. The oligomeric duplex of any of embodiments 98-100, wherein 1-4 3′-most nucleosides of the antisense or the sense RNAi oligonucleotide are overhanging nucleosides.
Embodiment 102. The oligomeric duplex of any of embodiments 98-101, wherein 1-4 5′-most nucleosides of the antisense or sense RNAi oligonucleotide are overhanging nucleosides.
Embodiment 103. The oligomeric duplex of any of embodiments 98-102, wherein the duplex is blunt ended at the 3′-end of the antisense RNAi oligonucleotide.
Embodiment 104. The oligomeric duplex of any of embodiments 98-103, wherein the duplex is blunt ended at the 5′-end of the antisense RNAi oligonucleotide.
Embodiment 105. The oligomeric duplex of any of embodiments 98-104, wherein at least one nucleoside of the sense RNAi oligonucleotide comprises a modified sugar moiety selected from: 2′-F, 2′-OMe, LNA, cEt, or a sugar surrogate selected from GNA, and UNA.
Embodiment 106. The oligomeric duplex of embodiment 105, wherein each nucleoside of the sense RNAi oligonucleotide comprises a modified sugar moiety or a sugar surrogate.
Embodiment 107. The oligomeric duplex of embodiment 105, wherein at least 80%, at least 90%, or 100% of the nucleosides of the sense RNAi oligonucleotide comprises a modified sugar moiety selected from 2′-F and 2′-OMe.
Embodiment 108. The oligomeric duplex of any of embodiments 98-107, wherein at least one nucleoside of the sense RNAi oligonucleotide comprises a modified nucleobase.
Embodiment 109. The oligomeric duplex of any of embodiments 98-108, wherein at least one internucleoside linkage of the sense RNAi oligonucleotide is a modified internucleoside linkage.
Embodiment 110. The oligomeric duplex of embodiment 109, wherein at least one internucleoside linkage of the sense RNAi oligonucleotide is a phosphorothioate internucleoside linkage.
Embodiment 111. The oligomeric duplex of any of embodiments 98-110, wherein the compound comprises 1-5 abasic sugar moieties attached to one or both ends of the antisense or sense RNA oligonucleotide.
Embodiment 112. The oligomeric duplex of embodiment 111, wherein the antisense RNAi oligonucleotide has a nucleobase sequence comprising the nucleobase sequence of any of SEQ ID NOs: 2324-2510; wherein the sense RNAi oligonucleotide has a nucleobase sequence comprising the corresponding complementary nucleobase sequence of any of SEQ ID NOs: 2511-2697; and wherein the nucleobase sequence of the sense RNAi oligonucleotide is 100% complementary to the nucleobase sequence of the antisense RNAi oligonucleotide.
Embodiment 113. The oligomeric duplex of any of embodiments 98-102, consisting of the antisense RNAi oligonucleotide and the sense RNAi oligonucleotide.
Embodiment 114. The oligomeric duplex of any of embodiments 98-113, wherein the second oligomeric compound comprises a conjugate group comprising a conjugate moiety and a conjugate linker.
Embodiment 115. The oligomeric duplex of embodiment 114, wherein the conjugate linker consists of a single bond.
Embodiment 116. The oligomeric duplex of embodiment 115, wherein the conjugate linker is cleavable.
Embodiment 117. The oligomeric duplex of embodiment 115 or 116, wherein the conjugate linker comprises 1-3 linker-nucleosides.
Embodiment 118. The oligomeric duplex of any of embodiments 114-117, wherein the conjugate group is attached to the 5′-end of the sense RNAi oligonucleotide.
Embodiment 119. The oligomeric duplex of any of embodiments 114-117, wherein the conjugate group is attached to the 3′-end of the sense RNAi oligonucleotide.
Embodiment 120. The oligomeric duplex of any of embodiments 114-119, wherein the conjugate group is attached via the 2′ position of a ribosyl sugar moiety at an internal position of the sense RNAi oligonucleotide.
Embodiment 121. The oligomeric duplex of any one of embodiment 98-120, wherein the second oligomeric compound comprises a terminal group.
Embodiment 122. A pharmaceutical composition comprising the oligomeric compound of any one of embodiments 75-95 or the oligomeric duplex of any one of embodiments 96-121; and a pharmaceutically acceptable carrier or diluent.
Embodiment 123. The pharmaceutical composition of embodiment 122, wherein the pharmaceutically acceptable diluent is water, sterile saline, or PBS.
Embodiment 124. The pharmaceutical composition of embodiment 123, wherein the pharmaceutical composition consists essentially of the oligomeric duplex and sterile saline.
Embodiment 125. A method comprising administering to a subject a pharmaceutical composition of any of embodiments 122-124.
Embodiment 126. A method of treating a disease associated with SPDEF comprising administering to a subject having or at risk for developing a disease associated with SPDEF a therapeutically effective amount of the oligomeric compound of any one of embodiments 75-95, the oligomeric duplex of any one of embodiments 93-118, or the pharmaceutical composition of any one of embodiments 122-124, thereby treating the disease associated with SPDEF.
Embodiment 127. The method of embodiment 126, wherein the disease associated with SPDEF is selected from bronchitis, asthma, chronic obstructive pulmonary disease, pulmonary fibrosis, idiopathic pulmonary fibrosis, pneumonia, emphysema, rhinitis, sinusitis, nasal polyposis, sinus polyposis, bronchiectasis, and sarcoidosis.
Embodiment 128. The method of any of embodiments 126 or 127, wherein at least one symptom or hallmark of the disease associated with SPDEF is ameliorated.
Embodiment 129. The method of embodiment 128, wherein the symptom or hallmark is shortness of breath, chest pain, coughing, wheezing, fatigue, and sleep disruption.
Embodiment 130. The method of embodiment 126, wherein the disease associated with SPDEF is ulcerative colitis.
Embodiment 131. Use of the oligomeric compound of any one of embodiments 78-98, the oligomeric duplex of any one of embodiments 96-121, or the pharmaceutical composition of any one of embodiments 122-124 for the treatment of a pulmonary condition.
Embodiment 132. The use of embodiment 131, wherein the pulmonary condition is selected from bronchitis, asthma, chronic obstructive pulmonary disease, pneumonia, emphysema, rhinitis, sinusitis, nasal polyposis, sinus polyposis, bronchiectasis, and sarcoidosis.
Embodiment 133. The use of embodiment 131, wherein the pulmonary condition is chronic bronchitis.
Embodiment 134. The use of embodiment 131, wherein the pulmonary condition is severe asthma.
Embodiment 135. A method of reducing mucus production in the gastrointestinal tract of a subject, the method comprising administering the oligomeric compound of any one of embodiments 75-95, the oligomeric duplex of any one of embodiments 96-121, or the pharmaceutical composition of any one of embodiments 122-124.
Embodiment 136. A method of treating a gastrointestinal condition comprising administering to a subject having or at risk for developing the gastrointestinal condition a therapeutically effective amount of the oligomeric compound of any one of embodiments 75-95, the oligomeric duplex of any one of embodiments 96-121, or the pharmaceutical composition of any one of embodiments 122-124, thereby treating the gastrointestinal condition.
Embodiment 137. A method of reducing SPDEF RNA or SPDEF protein in the gastrointestinal tract of a subject having or at risk for developing a gastrointestinal condition, the method comprising administering a therapeutically effective amount of the oligomeric compound of any one of embodiments 75-95, the oligomeric duplex of any one of embodiments 96-121, or the pharmaceutical composition of any one of embodiments 122-124, thereby reducing SPDEF RNA or SPDEF protein in the gastrointestinal tract.
Embodiment 138. The method of embodiment 136 or 137, wherein the gastrointestinal condition is ulcerative colitis.
Embodiment 139. A method of reducing inflammation in a subject in need thereof, the method comprising administering to the subject the oligomeric compound of any one of embodiments 1-36 and 75-95; the oligomeric duplex of any one of embodiments 37 and 96-121; the antisense compound of embodiment 38; the modified oligonucleotide of any one of embodiments 39-46; or the pharmaceutical composition of any one of embodiments 47-49 and 122-124, thereby reducing inflammation in the subject.
Embodiment 140. A method of reducing inflammation in a lung of a subject in need thereof, the method comprising administering to the subject the oligomeric compound of any one of embodiments 1-36 and 75-95; the oligomeric duplex of any one of embodiments 37 and 96-121; the antisense compound of embodiment 38; the modified oligonucleotide of any one of embodiments 39-46; or the pharmaceutical composition of any one of embodiments 47-49 and 122-124, thereby reducing inflammation in the lung of the subject.
Embodiment 141. A method of reducing inflammation in the gastrointestinal tract of a subject in need thereof, the method comprising administering to the subject the oligomeric compound of any one of embodiments 1-36 and 75-95; the oligomeric duplex of any one of embodiments 37 and 96-121; the antisense compound of embodiment 38; the modified oligonucleotide of any one of embodiments 39-46; or the pharmaceutical composition of any one of embodiments 47-49 and 122-124, thereby reducing inflammation of the gastrointestinal tract of the subject.

### Certain Compounds

[0097] Certain embodiments provide compounds targeted to a SPDEF nucleic acid. In certain embodiments, the SPDEF nucleic acid has the sequence set forth in RefSeq or GENBANK Accession No. GENBANK Accession No. NM_012391.2 (SEQ ID NO: 1), the complement of GENBANK Accession No. NC_000006.12 truncated from nucleotides 34536001 to 34558000 (SEQ ID NO: 2), GENBANK Accession No. NM_001252294.1 (SEQ ID NO: 3), GENBANK Accession No. XM_005248988.3 (SEQ ID NO: 4), or GENBANK Accession No. XM_006715048.1 (SEQ ID NO: 5), each of which is incorporated by reference in its entirety. In certain embodiments, the compound is an antisense compound or oligomeric compound. In certain embodiments, the compound is single-stranded.

[0098] Certain embodiments provide a compound comprising a modified oligonucleotide consisting of 8 to 80 linked nucleosides and having a nucleobase sequence comprising at least 8 contiguous nucleobases of any of the nucleobase sequences of SEQ ID NOs: 15-2284. In certain embodiments, the compound is an antisense compound or oligomeric compound. In certain embodiments, the compound is single-stranded. In certain embodiments, the modified oligonucleotide consists of 10 to 30 linked nucleosides.

[0099] Certain embodiments provide a compound comprising a modified oligonucleotide consisting of 9 to 80 linked nucleosides and having a nucleobase sequence comprising at least 9 contiguous nucleobases of any of the nucleobase sequences of SEQ ID NOs: 15-2284. In certain embodiments, the compound is an antisense compound or oligomeric compound. In certain embodiments, the compound is single-stranded. In certain embodiments, the modified oligonucleotide consists of 10 to 30 linked nucleosides.

[0100] Certain embodiments provide a compound comprising a modified oligonucleotide consisting of 10 to 80 linked nucleosides and having a nucleobase sequence comprising at least 10 contiguous nucleobases of any of the nucleobase sequences of SEQ ID NOs: 15-2284. In certain embodiments, the compound is an antisense compound or oligomeric compound. In certain embodiments, the compound is single-stranded. In certain embodiments, the modified oligonucleotide consists of 10 to 30 linked nucleosides.

[0101] Certain embodiments provide a compound comprising a modified oligonucleotide consisting of 11 to 80 linked nucleosides and having a nucleobase sequence comprising at least 11 contiguous nucleobases of any of the nucleobase sequences of SEQ ID NOs: 15-2284. In certain embodiments, the compound is an antisense compound or oligomeric compound. In certain embodiments, the compound is single-stranded. In certain embodiments, the modified oligonucleotide consists of 11 to 30 linked nucleosides.

[0102] Certain embodiments provide a compound comprising a modified oligonucleotide consisting of 12 to 80 linked nucleosides and having a nucleobase sequence comprising at least 12 contiguous nucleobases of any of the nucleobase sequences of SEQ ID NOs: 15-2284. In certain embodiments, the compound is an antisense compound or oligomeric compound. In certain embodiments, the compound is single-stranded. In certain embodiments, the modified oligonucleotide consists of 12 to 30 linked nucleosides.

[0103] Certain embodiments provide a compound comprising a modified oligonucleotide consisting of 16 to 80 linked nucleosides and having a nucleobase sequence comprising the nucleobase sequence of any one of SEQ ID NOs: 15-2284. In certain embodiments, the compound is an antisense compound or oligomeric compound. In certain embodiments, the compound is single-stranded. In certain embodiments, the modified oligonucleotide consists of 16 to 30 linked nucleosides.

[0104] Certain embodiments provide a compound comprising a modified oligonucleotide having a nucleobase sequence consisting of the nucleobase sequence of any one of SEQ ID NOs: 15-2284. In certain embodiments, the compound is an antisense compound or oligomeric compound. In certain embodiments, the compound is single-stranded.

[0105] In certain embodiments, a compound comprises a modified oligonucleotide consisting of 8 to 80 linked nucleosides and having at least an 8, 9, 10, 11, 12, 13, 14, 15, or 16 contiguous nucleobase portion complementary to an equal length portion within nucleotides 3531-3546, 9377-9392 9801-9816, 9802-9817, or 17492-17507 of SEQ ID NO: 2. In certain embodiments, the modified oligonucleotide consists of 10 to 30 linked nucleosides. In certain embodiments, the modified oligonucleotide consists of 16 to 30 linked nucleosides.

[0106] In certain embodiments, a compound comprises a modified oligonucleotide consisting of 8 to 80 linked nucleosides wherein the modified oligonucleotide is complementary within nucleotides 3531-3546, 9377-9392 9801-9816, 9802-9817, or 17492-17507 of SEQ ID NO: 2. In certain embodiments, the modified oligonucleotide consists of 10 to 30 linked nucleosides. In certain embodiments, the modified oligonucleotide consists of 16 to 30 linked nucleosides.

[0107] In certain embodiments, a compound comprises a modified oligonucleotide consisting of 8 to 80 linked nucleosides and having a nucleobase sequence comprising at least an 8, 9, 10, 11, 12, 13, 14, 15, or 16 contiguous nucleobase portion of the nucleobase sequence of any one of SEQ ID NOs: 1129, 1444, 761, 1983, or 2230. In certain embodiments, the modified oligonucleotide consists of 10 to 30 linked nucleosides.

[0108] In certain embodiments, the modified oligonucleotide consists of 16 to 30 linked nucleosides.

[0109] In certain embodiments, a compound comprises a modified oligonucleotide consisting of 16 to 80 linked nucleosides and having a nucleobase sequence comprising the nucleobase sequence of any one of SEQ ID NOs: 1129, 1444, 761, 1983, or 2230. In certain embodiments, the modified oligonucleotide consists of 16 to 30 linked nucleosides.

[0110] In certain embodiments, a compound comprises a modified oligonucleotide consisting of 16 linked nucleosides and having a nucleobase sequence consisting of any one of SEQ ID NOs: 1129, 1444, 761, 1983, or 2230.

[0111] In certain embodiments, any of the foregoing modified oligonucleotides has at least one modified internucleoside linkage, at least one modified sugar, and/or at least one modified nucleobase.

[0112] In certain embodiments, at least one nucleoside of any of the foregoing modified oligonucleotides comprises a modified sugar. In certain embodiments, the modified sugar comprises a 2′-O-methoxyethyl group. In certain embodiments, the modified sugar is a bicyclic sugar, such as a 4′-CH(CH₃)—O-2′ group, a 4′-CH₂—O-2′ group, or a 4′-(CH₂)2-O-2′ group.

[0113] In certain embodiments, at least one internucleoside linkage of the modified oligonucleotide comprises a modified internucleoside linkage, such as a phosphorothioate internucleoside linkage.

[0114] In certain embodiments, at least one nucleobase of any of the foregoing modified oligonucleotides is a modified nucleobase, such as 5-methylcytosine.

[0115] In certain embodiments, any of the foregoing modified oligonucleotides has:
[0116] a gap segment consisting of linked 2′-deoxynucleosides;
[0117] a 5′ wing segment consisting of linked nucleosides; and
[0118] a 3′ wing segment consisting of linked nucleosides;

[0119] wherein the gap segment is positioned between the 5′ wing segment and the 3′ wing segment and wherein each nucleoside of each wing segment comprises a modified sugar. In certain embodiments, the modified oligonucleotide consists of 16 to 80 linked nucleosides and has a nucleobase sequence comprising the nucleobase sequence recited in any one of SEQ ID NOs: 1129, 1444, 761, 1983, or 2230. In certain embodiments, the modified oligonucleotide consists of 16 to 30 linked nucleosides and has a nucleobase sequence comprising the nucleobase sequence recited in any one of SEQ ID NOs: 1129, 1444, 761, 1983, or 2230. In certain embodiments, the modified oligonucleotide consists of 16 linked nucleosides and has a nucleobase sequence consisting of the nucleobase sequence recited in any one of SEQ ID NOs: 1129, 1444, 761, 1983, or 2230.

[0120] In certain embodiments, a compound comprises or consists of a modified oligonucleotide consisting of 16 to 80 linked nucleobases and having a nucleobase sequence comprising the nucleobase sequence of any one of SEQ ID NOs: 15-2284, wherein the modified oligonucleotide has:
[0121] a gap segment consisting of linked 2′-deoxynucleosides;
[0122] a 5′ wing segment consisting of linked nucleosides; and
[0123] a 3′ wing segment consisting of linked nucleosides;

[0124] wherein the gap segment is positioned between the 5′ wing segment and the 3′ wing segment and wherein each nucleoside of each wing segment comprises a modified sugar. In certain embodiments, the modified oligonucleotide consists of 16 to 30 linked nucleosides. In certain embodiments, the modified oligonucleotide consists of 16 linked nucleosides.

[0125] In certain embodiments, a compound comprises or consists of a modified oligonucleotide consisting of 16 to 80 linked nucleobases and having a nucleobase sequence comprising the nucleobase sequence recited in any one of SEQ ID NOs: 1129, 1444, 761, 1983, or 2230, wherein the modified oligonucleotide has:
[0126] a gap segment consisting of linked 2′-deoxynucleosides;
[0127] a 5′ wing segment consisting of linked nucleosides; and
[0128] a 3′ wing segment consisting of linked nucleosides;

[0129] wherein the gap segment is positioned between the 5′ wing segment and the 3′ wing segment and wherein each nucleoside of each wing segment comprises a modified sugar. In certain embodiments, the modified oligonucleotide consists of 16 to 30 linked nucleosides. In certain embodiments, the modified oligonucleotide consists of 16 linked nucleosides.

[0130] In certain embodiments, a compound comprises or consists of a modified oligonucleotide consisting of 16 to 80 linked nucleobases and having a nucleobase sequence comprising the nucleobase sequence recited in any one of SEQ ID NOs: 1129, 1444, or 761, wherein the modified oligonucleotide has:

[0131] a gap segment consisting often linked 2′-deoxynucleosides;

[0132] a 5′ wing segment consisting of three linked nucleosides; and

[0133] a 3′ wing segment consisting of three linked nucleosides;

[0134] wherein the gap segment is positioned between the 5′ wing segment and the 3′ wing segment; wherein each nucleoside of each wing segment comprises a cEt nucleoside; wherein each internucleoside linkage is a phosphorothioate linkage; and wherein each cytosine is a 5-methylcytosine. In certain embodiments, the modified oligonucleotide consists of 16 to 30 linked nucleosides. In certain embodiments, the modified oligonucleotide consists of 16 linked nucleosides.

[0135] In certain embodiments, a compound comprises or consists of a modified oligonucleotide consisting of 16 to 80 linked nucleobases and having a nucleobase sequence comprising the nucleobase sequence recited in any one of SEQ ID NOs: 1983 or 2230, wherein the modified oligonucleotide comprises:

[0136] a gap segment consisting of nine linked 2′-deoxynucleosides;

[0137] a 5′ wing segment consisting of two linked nucleosides; and

[0138] a 3′ wing segment consisting of five linked nucleosides;

[0139] wherein the gap segment is positioned between the 5′ wing segment and the 3′ wing segment; wherein each nucleoside of the 5′ wing segment comprises a cEt nucleoside; wherein the 3′ wing segment comprises a 2′-O-methoxyethyl nucleoside, a 2′-O-methoxyethyl nucleoside, a 2′-O-methoxyethyl nucleoside, a cEt nucleoside, and a cEt nucleoside in the 5′ to 3′ direction; wherein each internucleoside linkage is a phosphorothioate linkage; and wherein each cytosine is a 5-methylcytosine. In certain embodiments, the modified oligonucleotide consists of 16 to 30 linked nucleosides. In certain embodiments, the modified oligonucleotide consists of 16 linked nucleosides. Certain methods

[0140] Certain embodiments provided herein relate to methods of inhibiting SPDEF expression, which can be useful for treating, preventing, or ameliorating a disease associated with SPDEF in a subject, by administration of a compound that targets a SPDEF nucleic acid. In certain embodiments, the compound can be a SPDEF specific inhibitor. In certain embodiments, the compound can be an antisense compound, oligomeric compound, or oligonucleotide targeted to a SPDEF nucleic acid.

[0141] Examples of diseases associated with SPDEF treatable, preventable, and/or ameliorable with the compounds and methods provided herein include bronchitis, asthma, COPD, pulmonary fibrosis, idiopathic pulmonary fibrosis (IPF), pneumonia, emphysema, rhinitis, sinusitis, nasal polyposis, sinus polyposis, bronchiectasis, or sarcoidosis.

[0142] In certain embodiments, methods comprise administering a compound comprising a SPDEF specific inhibitor to a subject. In certain embodiments, the subject has a disease associated with SPDEF. In certain embodiments, the subject has bronchitis, asthma, COPD, pulmonary fibrosis, idiopathic pulmonary fibrosis (IPF), pneumonia, emphysema, rhinitis, sinusitis, nasal polyposis, sinus polyposis, bronchiectasis, or sarcoidosis. In certain embodiments, the disease is asthma. In certain embodiments, the disease is IPF. In certain embodiments, the disease comprises inflammation. In certain embodiments, the disease comprises inflammation in a lung of the subject. In certain embodiments, the disease comprises inflammation in the gastrointestinal tract of the subject. In certain embodiments, the compound comprises an antisense compound targeted to a SPDEF nucleic acid. In certain embodiments, the compound comprises an oligonucleotide targeted to a SPDEF nucleic acid. In certain embodiments, the compound comprises a modified oligonucleotide consisting of 8 to 80 linked nucleosides and having a nucleobase sequence comprising at least 8 contiguous nucleobases of any of the nucleobase sequences of SEQ ID NOs: 15-2284. In certain embodiments, the compound comprises a modified oligonucleotide consisting of 16 to 80 linked nucleosides and having a nucleobase sequence comprising the nucleobase sequence of any one of SEQ ID NOs: 15-2284. In certain embodiments, the compound comprises a modified oligonucleotide consisting of the nucleobase sequence of any one of SEQ ID NOs: 15-2284. In certain embodiments, the compound comprises a modified oligonucleotide of 16 to 80 linked nucleosides in length and having a nucleobase sequence comprising any one of SEQ ID NOs: 1129, 1444, 761, 1983, or 2230. In certain embodiments, the compound comprises a modified oligonucleotide having a nucleobase sequence consisting of any one of SEQ ID NOs: 1129, 1444, 761, 1983, or 2230. In any of the foregoing embodiments, the modified oligonucleotide can consist of 16 to 30 linked nucleosides. In certain embodiments, the compound is ION 833561, 833741, 833748, 936142, or 936158. In any of the foregoing embodiments, the compound can be an antisense compound or oligomeric compound. In certain embodiments, administering the compound reduces mucus production. In certain embodiments, administering the compound reduces lung fibrosis. In certain embodiments, administering the compound improves lung function.

[0143] In certain embodiments, methods of treating or ameliorating a disease associated with SPDEF comprise administering to the subject a compound comprising a SPDEF specific inhibitor, thereby treating or ameliorating the disease. In certain embodiments, the disease is bronchitis, asthma, COPD, pulmonary fibrosis, idiopathic pulmonary fibrosis (IPF), pneumonia, emphysema, rhinitis, sinusitis, nasal polyposis, sinus polyposis, bronchiectasis, or sarcoidosis. In certain embodiments, the disease is asthma. In certain embodiments, the disease is IPF. In certain embodiments, the disease comprises inflammation. In certain embodiments, the disease comprises inflammation in a lung of the subject. In certain embodiments, the disease comprises inflammation in the gastrointestinal tract of the subject. In certain embodiments, the compound comprises an antisense compound targeted to a SPDEF nucleic acid. In certain embodiments, the compound comprises an oligonucleotide targeted to a SPDEF nucleic acid. In certain embodiments, the compound comprises a modified oligonucleotide consisting of 8 to 80 linked nucleosides and having a nucleobase sequence comprising at least 8 contiguous nucleobases of any of the nucleobase sequences of SEQ ID NOs: 15-2284. In certain embodiments, the compound comprises a modified oligonucleotide consisting of 16 to 80 linked nucleosides and having a nucleobase sequence comprising the nucleobase sequence of any one of SEQ ID NOs: 15-2284. In certain embodiments, the compound comprises a modified oligonucleotide consisting of the nucleobase sequence of any one of SEQ ID NOs: 15-2284. In certain embodiments, the compound comprises a modified oligonucleotide of 16 to 80 linked nucleosides in length and having a nucleobase sequence comprising any one of SEQ ID NOs: 1129, 1444, 761, 1983, or 2230. In certain embodiments, the compound comprises a modified oligonucleotide having a nucleobase sequence consisting of any one of SEQ ID NOs: 1129, 1444, 761, 1983, or 2230. In any of the foregoing embodiments, the modified oligonucleotide can consist of 16 to 30 linked nucleosides. In certain embodiments, the compound is ION 833561, 833741, 833748, 936142, or 936158. In any of the foregoing embodiments, the compound can be an antisense compound or oligomeric compound. In certain embodiments, administering the compound reduces mucus production. In certain embodiments, administering the compound reduces lung fibrosis. In certain embodiments, administering the compound improves lung function.

[0144] In certain embodiments, methods of inhibiting expression of SPDEF in a subject having, or at risk of having, a disease associated with SPDEF comprise administering to the subject a compound comprising a SPDEF specific inhibitor, thereby inhibiting expression of SPDEF in the subject. In certain embodiments, administering the compound inhibits expression of SPDEF in the lung. In certain embodiments, the subject has, or is at risk of having bronchitis, asthma, COPD, pulmonary fibrosis, idiopathic pulmonary fibrosis (IPF), pneumonia, emphysema, rhinitis, sinusitis, nasal polyposis, sinus polyposis, bronchiectasis, or sarcoidosis. In certain embodiments, the disease is asthma. In certain embodiments, the disease is IPF. In certain embodiments, the disease comprises inflammation. In certain embodiments, the disease comprises inflammation in a lung of the subject. In certain embodiments, the disease comprises inflammation in the gastrointestinal tract of the subject. In certain embodiments, the compound comprises an antisense compound targeted to a SPDEF nucleic acid. In certain embodiments, the compound comprises an oligonucleotide targeted to a SPDEF nucleic acid. In certain embodiments, the compound comprises a modified oligonucleotide consisting of 8 to 80 linked nucleosides and having a nucleobase sequence comprising at least 8 contiguous nucleobases of any of the nucleobase sequences of SEQ ID NOs: 15-2284. In certain embodiments, the compound comprises a modified oligonucleotide consisting of 16 to 80 linked nucleosides and having a nucleobase sequence comprising the nucleobase sequence of any one of SEQ ID NOs: 15-2284. In certain embodiments, the compound comprises a modified oligonucleotide consisting of the nucleobase sequence of any one of SEQ ID NOs: 15-2284. In certain embodiments, the compound comprises a modified oligonucleotide of 16 to 80 linked nucleosides in length and having a nucleobase sequence comprising any one of SEQ ID NOs: 1129, 1444, 761, 1983, or 2230. In certain embodiments, the compound comprises a modified oligonucleotide having a nucleobase sequence consisting of any one of SEQ ID NOs: 1129, 1444, 761, 1983, or 2230. In any of the foregoing embodiments, the modified oligonucleotide can consist of 16 to 30 linked nucleosides. In certain embodiments, the compound is ION 833561, 833741, 833748, 936142, or 936158. In any of the foregoing embodiments, the compound can be single-stranded. In any of the foregoing embodiments, the compound can be an antisense compound or oligomeric compound. In certain embodiments, the compound is administered to the subject parenterally. In certain embodiments, administering the compound reduces mucus production. In certain embodiments, administering the compound reduces lung fibrosis. In certain embodiments, administering the compound improves lung function. In certain embodiments, the subject is identified as having or at risk of having a disease associated with SPDEF.

[0145] In certain embodiments, methods of inhibiting expression of SPDEF in a cell comprise contacting the cell with a compound comprising a SPDEF specific inhibitor, thereby inhibiting expression of SPDEF in the cell. In certain embodiments, the cell is a lung cell. In certain embodiments, the cell is in the lung of a subject who has, or is at risk of having bronchitis, asthma, COPD, pulmonary fibrosis, idiopathic pulmonary fibrosis (IPF), pneumonia, emphysema, rhinitis, sinusitis, nasal polyposis, sinus polyposis, bronchiectasis, or sarcoidosis. In certain embodiments, the cell is in the lung of a subject who has asthma. In certain embodiments, the cell is in the lung of a subject who has IPF. In certain embodiments, the disease comprises inflammation. In certain embodiments, the disease comprises inflammation in a lung of the subject. In certain embodiments, the disease comprises inflammation in the gastrointestinal tract of the subject. In certain embodiments, the compound comprises an antisense compound targeted to a SPDEF nucleic acid. In certain embodiments, the compound comprises an oligonucleotide targeted to a SPDEF nucleic acid. In certain embodiments, the compound comprises a modified oligonucleotide consisting of 8 to 80 linked nucleosides and having a nucleobase sequence comprising at least 8 contiguous nucleobases of any of the nucleobase sequences of SEQ ID NOs: 15-2284. In certain embodiments, the compound comprises a modified oligonucleotide consisting of 16 to 80 linked nucleosides and having a nucleobase sequence comprising the nucleobase sequence of any one of SEQ ID NOs: 15-2284. In certain embodiments, the compound comprises a modified oligonucleotide consisting of the nucleobase sequence of any one of SEQ ID NOs: 15-2284. In certain embodiments, the compound comprises a modified oligonucleotide of 16 to 80 linked nucleosides in length and having a nucleobase sequence comprising any one of SEQ ID NOs: 1129, 1444, 761, 1983, or 2230. In certain embodiments, the compound comprises a modified oligonucleotide having a nucleobase sequence consisting of any one of SEQ ID NOs: 1129, 1444, 761, 1983, or 2230. In any of the foregoing embodiments, the modified oligonucleotide can consist of 16 to 30 linked nucleosides. In certain embodiments, the compound is ION 833561, 833741, 833748, 936142, or 936158. In any of the foregoing embodiments, the compound can be single-stranded. In any of the foregoing embodiments, the compound can be an antisense compound or oligomeric compound.

[0146] Certain embodiments are drawn to a compound comprising a SPDEF specific inhibitor for use in treating a disease associated with SPDEF. In certain embodiments, the disease is bronchitis, asthma, COPD, pulmonary fibrosis, idiopathic pulmonary fibrosis (IPF), pneumonia, emphysema, rhinitis, sinusitis, nasal polyposis, sinus polyposis, bronchiectasis, or sarcoidosis. In certain embodiments, the disease is asthma. In certain embodiments, the disease is IPF. In certain embodiments, the disease comprises inflammation. In certain embodiments, the disease comprises inflammation in a lung of the subject. In certain embodiments, the disease comprises inflammation in the gastrointestinal tract of the subject. In certain embodiments, the compound comprises an antisense compound targeted to a SPDEF nucleic acid. In certain embodiments, the compound comprises an oligonucleotide targeted to a SPDEF nucleic acid. In certain embodiments, the compound comprises a modified oligonucleotide consisting of 8 to 80 linked nucleosides and having a nucleobase sequence comprising at least 8 contiguous nucleobases of any of the nucleobase sequences of SEQ ID NOs: 15-2284. In certain embodiments, the compound comprises a modified oligonucleotide consisting of 16 to 80 linked nucleosides and having a nucleobase sequence comprising the nucleobase sequence of any one of SEQ ID NOs: 15-2284. In certain embodiments, the compound comprises a modified oligonucleotide consisting of the nucleobase sequence of any one of SEQ ID NOs: 15-2284. In certain embodiments, the compound comprises a modified oligonucleotide of 16 to 80 linked nucleosides in length and having a nucleobase sequence comprising any one of SEQ ID NOs: 1129, 1444, 761, 1983, or 2230. In certain embodiments, the compound comprises a modified oligonucleotide having a nucleobase sequence consisting of any one of SEQ ID NOs: 1129, 1444, 761, 1983, or 2230. In any of the foregoing embodiments, the modified oligonucleotide can consist of 16 to 30 linked nucleosides. In certain embodiments, the compound is ION 833561, 833741, 833748, 936142, or 936158. In any of the foregoing embodiments, the compound can be single-stranded. In any of the foregoing embodiments, the compound can be an antisense compound or oligomeric compound.

[0147] Certain embodiments are drawn to use of a compound comprising a SPDEF specific inhibitor for the manufacture or preparation of a medicament for treating a disease associated with SPDEF. In certain embodiments, the disease is bronchitis, asthma, COPD, pulmonary fibrosis, idiopathic pulmonary fibrosis (IPF), pneumonia, emphysema, rhinitis, sinusitis, nasal polyposis, sinus polyposis, bronchiectasis, or sarcoidosis. In certain embodiments, the disease is asthma. In certain embodiments, the disease is IPF. In certain embodiments, the disease comprises inflammation. In certain embodiments, the disease comprises inflammation in a lung of the subject. In certain embodiments, the disease comprises inflammation in the gastrointestinal tract of the subject. In certain embodiments, the compound comprises an antisense compound targeted to a SPDEF nucleic acid. In certain embodiments, the compound comprises an oligonucleotide targeted to a SPDEF nucleic acid. In certain embodiments, the compound comprises a modified oligonucleotide consisting of 8 to 80 linked nucleosides and having a nucleobase sequence comprising at least 8 contiguous nucleobases of any of the nucleobase sequences of SEQ ID NOs: 15-2284. In certain embodiments, the compound comprises a modified oligonucleotide consisting of 16 to 80 linked nucleosides and having a nucleobase sequence comprising the nucleobase sequence of any one of SEQ ID NOs: 15-2284. In certain embodiments, the compound comprises a modified oligonucleotide consisting of the nucleobase sequence of any one of SEQ ID NOs: 15-2284. In certain embodiments, the compound comprises a modified oligonucleotide of 16 to 80 linked nucleosides in length and having a nucleobase sequence comprising any one of SEQ ID NOs: 1129, 1444, 761, 1983, or 2230. In certain embodiments, the compound comprises a modified oligonucleotide having a nucleobase sequence consisting of any one of SEQ ID NOs: 1129, 1444, 761, 1983, or 2230. In any of the foregoing embodiments, the modified oligonucleotide can consist of 16 to 30 linked nucleosides. In certain embodiments, the compound is ION 833561, 833741, 833748, 936142, or 936158. In any of the foregoing embodiments, the compound can be single-stranded. In any of the foregoing embodiments, the compound can be an antisense compound or oligomeric compound.

[0148] In any of the foregoing methods or uses, the compound can be targeted to a SPDEF nucleic acid. In certain embodiments, the compound comprises or consists of a modified oligonucleotide, for example a modified oligonucleotide consisting of 8 to 80 linked nucleosides, 10 to 30 linked nucleosides, 12 to 30 linked nucleosides, or 16 linked nucleosides. In certain embodiments, the modified oligonucleotide is at least 80%, 85%, 90%, 95% or 100% complementary to any of the nucleobase sequences recited in SEQ ID NOs: 1-5. In certain embodiments, the modified oligonucleotide comprises at least one modified internucleoside linkage, at least one modified sugar and/or at least one modified nucleobase. In certain embodiments, the modified internucleoside linkage is a phosphorothioate internucleoside linkage, the modified sugar is a bicyclic sugar or a 2′-O-methoxyethyl, and the modified nucleobase is a 5-methylcytosine. In certain embodiments, the modified oligonucleotide comprises a gap segment consisting of linked 2′-deoxynucleosides; a 5′ wing segment consisting of linked nucleosides; and a 3′ wing segment consisting of linked nucleosides, wherein the gap segment is positioned immediately adjacent to and between the 5′ wing segment and the 3′ wing segment and wherein each nucleoside of each wing segment comprises a modified sugar.

[0149] In any of the foregoing methods or uses, the compound can comprise or consist of a modified oligonucleotide consisting of 16 to 80 linked nucleosides and having a nucleobase sequence comprising the nucleobase sequence of any one of SEQ ID NOs: 15-2284, wherein the modified oligonucleotide comprises:
[0150] a gap segment consisting of linked 2′-deoxynucleosides;
[0151] a 5′ wing segment consisting of linked nucleosides; and
[0152] a 3′ wing segment consisting of linked nucleosides;

[0153] wherein the gap segment is positioned between the 5′ wing segment and the 3′ wing segment and wherein each nucleoside of each wing segment comprises a modified sugar. In certain embodiments, the modified oligonucleotide consists of 16 to 30 linked nucleosides. In certain embodiments, the modified oligonucleotide consists of 16 linked nucleosides.

[0154] In any of the foregoing methods or uses, the compound can comprise or consist of a modified oligonucleotide consisting of 16 to 80 linked nucleobases and having a nucleobase sequence comprising the nucleobase sequence recited in any one of SEQ ID NOs: 1129, 1444, 761, 1983, or 2230, wherein the modified oligonucleotide comprises:
[0155] a gap segment consisting of linked 2′-deoxynucleosides;
[0156] a 5′ wing segment consisting of linked nucleosides; and
[0157] a 3′ wing segment consisting of linked nucleosides;

[0158] wherein the gap segment is positioned between the 5′ wing segment and the 3′ wing segment and wherein each nucleoside of each wing segment comprises a modified sugar. In certain embodiments, the modified oligonucleotide consists of 16 to 30 linked nucleosides. In certain embodiments, the modified oligonucleotide consists of 16 linked nucleosides.

[0159] In any of the foregoing methods or uses, the compound can comprise or consist of a modified oligonucleotide consisting of 16 to 80 linked nucleobases and having a nucleobase sequence comprising the nucleobase sequence recited in any one of SEQ ID NOs: 1129, 1444, or 761, wherein the modified oligonucleotide comprises:

[0160] a gap segment consisting often linked 2′-deoxynucleosides;

[0161] a 5′ wing segment consisting of three linked nucleosides; and

[0162] a 3′ wing segment consisting of three linked nucleosides;

[0163] wherein the gap segment is positioned between the 5′ wing segment and the 3′ wing segment; wherein each nucleoside of each wing segment comprises a cEt nucleoside; wherein each internucleoside linkage is a phosphorothioate linkage; and wherein each cytosine is a 5-methylcytosine. In certain embodiments, the modified oligonucleotide consists of 16 to 30 linked nucleosides. In certain embodiments, the modified oligonucleotide consists of 16 linked nucleosides.

[0164] In any of the foregoing methods or uses, the compound can comprise or consist of a modified oligonucleotide consisting of 16 to 80 linked nucleobases and having a nucleobase sequence comprising the nucleobase sequence recited in any one of SEQ ID NOs: 1983 or 2230, wherein the modified oligonucleotide comprises:

[0165] a gap segment consisting of nine linked 2′-deoxynucleosides;

[0166] a 5′ wing segment consisting of two linked nucleosides; and

[0167] a 3′ wing segment consisting of five linked nucleosides;

[0168] wherein the gap segment is positioned between the 5′ wing segment and the 3′ wing segment; wherein each nucleoside of the 5′ wing segment comprises a cEt nucleoside; wherein the 3′ wing segment comprises a 2′-O-methoxyethyl nucleoside, a 2′-O-methoxyethyl nucleoside, a 2′-O-methoxyethyl nucleoside, a cEt nucleoside, and a cEt nucleoside in the 5′ to 3′ direction; wherein each internucleoside linkage is a phosphorothioate linkage; and wherein each cytosine is a 5-methylcytosine. In certain embodiments, the modified oligonucleotide consists of 16 to 30 linked nucleosides. In certain embodiments, the modified oligonucleotide consists of 16 linked nucleosides.

[0169] I. Certain Oligonucleotides

[0170] In certain embodiments, provided herein are oligomeric compounds comprising oligonucleotides, which consist of linked nucleosides. Oligonucleotides may be unmodified oligonucleotides (RNA or DNA) or may be modified oligonucleotides. Modified oligonucleotides comprise at least one modification relative to unmodified RNA or DNA. That is, modified oligonucleotides comprise at least one modified nucleoside (comprising a modified sugar moiety and/or a modified nucleobase) and/or at least one modified internucleoside linkage.

[0171] A. Certain Modified Nucleosides

[0172] Modified nucleosides comprise a modified sugar moiety or a modified nucleobase or both a modified sugar moiety and a modified nucleobase.

[0173] 1. Certain Sugar Moieties

[0174] In certain embodiments, modified sugar moieties are non-bicyclic modified sugar moieties. In certain embodiments, modified sugar moieties are bicyclic or tricyclic sugar moieties. In certain embodiments, modified sugar moieties are sugar surrogates. Such sugar surrogates may comprise one or more substitutions corresponding to those of other types of modified sugar moieties.

[0175] In certain embodiments, modified sugar moieties are non-bicyclic modified sugar moieties comprising a furanosyl ring with one or more substituent groups none of which bridges two atoms of the furanosyl ring to form a bicyclic structure. Such non-bridging substituents may be at any position of the furanosyl, including but not limited to substituents at the 2′, 4′, and/or 5′ positions. In certain embodiments one or more non-bridging substituent of non-bicyclic modified sugar moieties is branched. Examples of 2′-substituent groups suitable for non-bicyclic modified sugar moieties include but are not limited to: 2′-F, 2′—OCH₃ (“OMe” or “O-methyl”), and 2′-O(CH₂)₂OCH₃ (“MOE”). In certain embodiments, 2′-substituent groups are selected from among: halo, allyl, amino, azido, SH, CN, OCN, CF₃, OCF₃, O—C₁-C₁₀ alkoxy, O—C₁-C₁₀ substituted alkoxy, O—C₁-C₁₀ alkyl, O—C₁-C₁₀ substituted alkyl, S-alkyl, N(Rₘ)-alkyl, O-alkenyl, S-alkenyl, N(Rₘ)-alkenyl, O-alkynyl, S-alkynyl, N(Rₘ)-alkynyl, O-alkylenyl-O-alkyl, alkynyl, alkaryl, aralkyl, O-alkaryl, O-aralkyl, O(CH₂)₂SCH₃, O(CH₂)₂ON(Rₘ)(Rₙ) or OCH₂C(═O)—N(Rₘ)(R), where each Rₘ and Rₙ is, independently, H, an amino protecting group, or substituted or unsubstituted C₁-C₁₀ alkyl, and the 2′-substituent groups described in Cook et al., U.S. Pat. No. 6,531,584; Cook et al., U.S. Pat. No. 5,859,221; and Cook et al., U.S. Pat. No. 6,005,087. Certain embodiments of these 2′-substituent groups can be further substituted with one or more substituent groups independently selected from among: hydroxyl, amino, alkoxy, carboxy, benzyl, phenyl, nitro (NO₂), thiol, thioalkoxy, thioalkyl, halogen, alkyl, aryl, alkenyl and alkynyl. Examples of 4′-substituent groups suitable for non-bicyclic modified sugar moieties include but are not limited to alkoxy (e.g., methoxy), alkyl, and those described in Manoharan et al., WO 2015/106128. Examples of 5′-substituent groups suitable for non-bicyclic modified sugar moieties include but are not limited to: 5-methyl (R or S), 5′-vinyl, and 5′-methoxy. In certain embodiments, non-bicyclic modified sugar moieties comprise more than one non-bridging sugar substituent, for example, 2′-F-5′-methyl sugar moieties and the modified sugar moieties and modified nucleosides described in Migawa et al., WO 2008/101157 and Rajeev et al., US2013/0203836.).

[0176] In certain embodiments, a 2′-substituted non-bicyclic modified nucleoside comprises a sugar moiety comprising a non-bridging 2′-substituent group selected from: F, NH₂, N₃, OCF₃, OCH₃, O(CH₂)₃NH₂, CH₂CH═CH₂, OCH₂CH═CH₂, OCH₂CH₂OCH₃, O(CH₂)₂SCH₃, O(CH₂)₂ON(Rₘ)(Rₙ), O(CH₂)₂O(CH₂)₂N(CH₃)₂, and N-substituted acetamide (OCH₂C(═O)—N(Rₘ)(R)), where each Rₘ and Rₙ is, independently, H, an amino protecting group, or substituted or unsubstituted C₁-C₁₀ alkyl.

[0177] In certain embodiments, a 2′-substituted nucleoside non-bicyclic modified nucleoside comprises a sugar moiety comprising a non-bridging 2′-substituent group selected from: F, OCF₃, OCH₃, OCH₂CH₂OCH₃, O(CH₂)₂SCH₃, O(CH₂)₂ON(CH₃)₂, O(CH₂)₂O(CH₂)₂N(CH₃)₂, and OCH₂C(═O)—N(H)CH₃ (“NMA”).

[0178] In certain embodiments, a 2′-substituted non-bicyclic modified nucleoside comprises a sugar moiety comprising a non-bridging 2′-substituent group selected from: F, OCH₃, and OCH₂CH₂OCH₃.

[0179] Certain modified sugar moieties comprise a substituent that bridges two atoms of the furanosyl ring to form a second ring, resulting in a bicyclic sugar moiety. In certain such embodiments, the bicyclic sugar moiety comprises a bridge between the 4′ and the 2′ furanose ring atoms. Examples of such 4′ to 2′ bridging sugar substituents include but are not limited to: 4′-CH₂-2′, 4′-(CH₂)₂-2′, 4′-(CH₂)₃-2′, 4′-CH₂—O-2′ (“LNA”), 4′-CH₂—S-2′, 4′-(CH₂)₂—O-2′ (“ENA”), 4′-CH(CH₃)—O-2′ (referred to as “constrained ethyl” or “cEt”), 4′-CH₂—O—CH₂-2′, 4′-CH₂—N(R)-2′, 4′-CH(CH₂OCH₃)—O-2′ (“constrained MOE” or “cMOE”) and analogs thereof (see, e.g., Seth et al., U.S. Pat. No. 7,399,845, Bhat et al., U.S. Pat. No. 7,569,686, Swayze et al., U.S. Pat. No. 7,741,457, and Swayze et al., U.S. Pat. No. 8,022,193), 4′-C(CH₃)(CH₃)—O-2′ and analogs thereof (see, e.g., Seth et al., U.S. Pat. No. 8,278,283), 4′—CH₂—N(OCH₃)-2′ and analogs thereof (see, e.g., Prakash et al., U.S. Pat. No. 8,278,425), 4′-CH₂—O—N(CH₃)-2′ (see, e.g., Allerson et al., U.S. Pat. No. 7,696,345 and Allerson et al., U.S. Pat. No. 8,124,745), 4′-CH₂—C(H)(CH₃)-2′ (see, e.g., Zhou, et al., J. Org. Chem., 2009, 74, 118-134), 4′-CH₂—C(═CH₂)-2′ and analogs thereof (see e.g., Seth et al., U.S. Pat. No. 8,278,426), 4′-C(RₐR_{b})—N(R)—O-2′, 4′-C(RₐR_{b})—O—N(R)-2′, 4′-CH₂—O—N(R)-2′, and 4′-CH₂—N(R)—O- 2′, wherein each R, Rₐ, and R_{b} is, independently, H, a protecting group, or C₁-C₁₂ alkyl (see, e.g. Imanishi et al., U.S. Pat. No. 7,427,672).

[0180] In certain embodiments, such 4′ to 2′ bridges independently comprise from 1 to 4 linked groups independently selected from: —[C(Rₐ)(R_{b})]ₙ—, —[C(Rₐ)(R_{b})]ₙ—O—, —C(Rₐ)═C(R_{b})—, —C(Rₐ)═N—, —C(═NRₐ)—, —C(═O)—, —C(═S)—, —O—, —Si(Rₐ)₂—, —S(═O)ₓ—, and —N(Rₐ)—; wherein: x is 0, 1, or 2; n is 1, 2, 3, or 4; each Rₐ and R_{b} is, independently selected from: H, a protecting group, hydroxyl, C₁-C₁₂ alkyl, substituted C₁-C₁₂ alkyl, C₂-C₁₂ alkenyl, substituted C₂-C₁₂ alkenyl, C₂-C₁₂ alkynyl, substituted C₂-C₁₂ alkynyl, C₅-C₂₀ aryl, substituted C₅-C₂₀ aryl, heterocycle radical, substituted heterocycle radical, heteroaryl, substituted heteroaryl, C₅-C₇ alicyclic radical, substituted C₅-C₇ alicyclic radical, halogen, OJ₁, NJ₁J₂, SJ₁, N₃, COOJ₁, acyl (C(═O)—H), substituted acyl, CN, sulfonyl (S(═O)₂-J₁), and sulfoxyl (S(═O)-J₁); and each J₁ and J₂ is, independently selected from: H, C₁-C₁₂ alkyl, substituted C₁-C₁₂ alkyl, C₂-C₁₂ alkenyl, substituted C₂-C₁₂ alkenyl, C₂-C₁₂ alkynyl, substituted C₂-C₁₂ alkynyl, C₅-C₂₀ aryl, substituted C₅-C₂₀ aryl, acyl (C(═O)—H), substituted acyl, a heterocycle radical, a substituted heterocycle radical, C₁-C₁₂ aminoalkyl, substituted C₁-C₁₂ aminoalkyl, and a protecting group.

[0181] Additional bicyclic sugar moieties are known in the art, see, for example: Freier et al., Nucleic Acids Research, 1997, 25(22), 4429-4443, Albaek et al., J. Org. Chem., 2006, 71, 7731-7740, Singh et al., Chem. Commun., 1998, 4, 455-456; Koshkin et al., Tetrahedron, 1998, 54, 3607-3630; Kumar et al., Bioorg. Med. Chem. Lett., 1998, 8, 2219-2222; Singh et al., J. Org. Chem., 1998, 63, 10035-10039; Srivastava et al., J. Am. Chem. Soc., 2007, 129, 8362-8379; Wengel et al., U.S. Pat. No. 7,053,207; Imanishi et al., U.S. Pat. No. 6,268,490; Imanishi et al. U.S. Pat. No. 6,770,748; Imanishi et al., U.S. RE44,779; Wengel et al., U.S. Pat. No. 6,794,499; Wengel et al., U.S. Pat. No. 6,670,461; Wengel et al., U.S. Pat. No. 7,034,133; Wengel et al., U.S. Pat. No. 8,080,644; Wengel et al., U.S. Pat. No. 8,034,909; Wengel et al., U.S. Pat. No. 8,153,365; Wengel et al., U.S. Pat. No. 7,572,582; and Ramasamy et al., U.S. Pat. No. 6,525,191; Torsten et al., WO 2004/106356; Wengel et al., WO 1999/014226; Seth et al., WO 2007/134181; Seth et al., U.S. Pat. No. 7,547,684; Seth et al., U.S. Pat. No. 7,666,854; Seth et al., U.S. Pat. No. 8,088,746; Seth et al., U.S. Pat. No. 7,750,131; Seth et al., U.S. Pat. No. 8,030,467; Seth et al., U.S. Pat. No. 8,268,980; Seth et al., U.S. Pat. No. 8,546,556; Seth et al., U.S. Pat. No. 8,530,640; Migawa et al., U.S. Pat. No. 9,012,421; Seth et al., U.S. Pat. No. 8,501,805; and U.S. Patent Publication Nos. Allerson et al., US2008/0039618 and Migawa et al., US2015/0191727.

[0182] In certain embodiments, bicyclic sugar moieties and nucleosides incorporating such bicyclic sugar moieties are further defined by isomeric configuration. For example, an LNA nucleoside (described herein) may be in the α-L configuration or in the β-D configuration.

[chemical structure]

α-L-methyleneoxy (4′-CH₂—O-2′) or α-L-LNA bicyclic nucleosides have been incorporated into oligonucleotides that showed antisense activity (Frieden et al., Nucleic Acids Research, 2003, 21, 6365-6372). Herein, general descriptions of bicyclic nucleosides include both isomeric configurations. When the positions of specific bicyclic nucleosides (e.g., LNA or cEt) are identified in exemplified embodiments herein, they are in the β-D configuration, unless otherwise specified.

[0183] In certain embodiments, modified sugar moieties comprise one or more non-bridging sugar substituent and one or more bridging sugar substituent (e.g., 5′-substituted and 4′-2′ bridged sugars).

[0184] In certain embodiments, modified sugar moieties are sugar surrogates. In certain such embodiments, the oxygen atom of the sugar moiety is replaced, e.g., with a sulfur, carbon or nitrogen atom. In certain such embodiments, such modified sugar moieties also comprise bridging and/or non-bridging substituents as described herein. For example, certain sugar surrogates comprise a 4′-sulfur atom and a substitution at the 2′-position (see, e.g., Bhat et al., U.S. Pat. No. 7,875,733 and Bhat et al., U.S. Pat. No. 7,939,677) and/or the 5′ position.

[0185] In certain embodiments, sugar surrogates comprise rings having other than 5 atoms. For example, in certain embodiments, a sugar surrogate comprises a six-membered tetrahydropyran (“THP”). Such tetrahydropyrans may be further modified or substituted. Nucleosides comprising such modified tetrahydropyrans include but are not limited to hexitol nucleic acid (“HNA”), anitol nucleic acid (“ANA”), manitol nucleic acid (“MNA”) (see, e.g., Leumann, C J. Bioorg. & Med. Chem. 2002, 10, 841-854), fluoro HNA:

[chemical structure]

(“F-HNA”, see e.g. Swayze et al., U.S. Pat. No. 8,088,904; Swayze et al., U.S. Pat. No. 8,440,803; Swayze et al., U.S. Pat. No. 8,796,437; and Swayze et al., U.S. Pat. No. 9,005,906; F-HNA can also be referred to as a F-THP or 3′-fluoro tetrahydropyran), and nucleosides comprising additional modified THP compounds having the formula:

[chemical structure]

wherein, independently, for each of said modified THP nucleoside: Bx is a nucleobase moiety; T₃ and T₄ are each, independently, an internucleoside linking group linking the modified THP nucleoside to the remainder of an oligonucleotide or one of T₃ and T₄ is an internucleoside linking group linking the modified THP nucleoside to the remainder of an oligonucleotide and the other of T₃ and T₄ is H, a hydroxyl protecting group, a linked conjugate group, or a 5′ or 3′-terminal group; q₁, q₂, q₃, q₄, q₅, q₆ and q₇ are each, independently, H, C₁-C₆ alkyl, substituted C₁-C₆ alkyl, C₂-C₆ alkenyl, substituted C₂-C₆ alkenyl, C₂-C₆ alkynyl, or substituted C₂-C₆ alkynyl; and each of R₁ and R₂ is independently selected from among: hydrogen, halogen, substituted or unsubstituted alkoxy, NJ₁J₂, SJ₁, N₃, OC(═X)J₁, OC(═X)NJ₁J₂, NJ₃C(═X)NJ₁J₂, and CN, wherein X is O, S or NJ₁, and each J₁, J₂, and J₃ is, independently, H or C₁-C₆ alkyl.

[0186] In certain embodiments, modified THP nucleosides are provided wherein q₁, q₂, q₃, q₄, q₅, q₆ and q₇ are each H. In certain embodiments, at least one of q₁, q₂, q₃, q₄, q₅, q₆ and q₇ is other than H. In certain embodiments, at least one of q₁, q₂, q₃, q₄, q₅, q₆ and q₇ is methyl. In certain embodiments, modified THP nucleosides are provided wherein one of R₁ and R₂ is F. In certain embodiments, R₁ is F and R₂ is H, in certain embodiments, R₁ is methoxy and R₂ is H, and in certain embodiments, R₁ is methoxyethoxy and R₂ is H.

[0187] In certain embodiments, sugar surrogates comprise rings having more than 5 atoms and more than one heteroatom. For example, nucleosides comprising morpholino sugar moieties and their use in oligonucleotides have been reported (see, e.g., Braasch et al., Biochemistry, 2002, 41, 4503-4510 and Summerton et al., U.S. Pat. No. 5,698,685; Summerton et al., U.S. Pat. No. 5,166,315; Summerton et al., U.S. Pat. No. 5,185,444; and Summerton et al., U.S. Pat. No. 5,034,506). As used here, the term “morpholino” means a sugar surrogate having the following structure:

[chemical structure]

[0188] In certain embodiments, morpholinos may be modified, for example by adding or altering various substituent groups from the above morpholino structure. Such sugar surrogates are referred to herein as “modified morpholinos.”

[0189] In certain embodiments, sugar surrogates comprise acyclic moieties. Examples of nucleosides and oligonucleotides comprising such acyclic sugar surrogates include but are not limited to: peptide nucleic acid (“PNA”), acyclic butyl nucleic acid (see, e.g., Kumar et al., Org. Biomol. Chem., 2013, 11, 5853-5865), and nucleosides and oligonucleotides described in Manoharan et al., WO2011/133876.

[0190] Many other bicyclic and tricyclic sugar and sugar surrogate ring systems are known in the art that can be used in modified nucleosides.

[0191] 2. Certain Modified Nucleobases

[0192] In certain embodiments, modified oligonucleotides comprise one or more nucleoside comprising an unmodified nucleobase. In certain embodiments, modified oligonucleotides comprise one or more nucleoside comprising a modified nucleobase. In certain embodiments, modified oligonucleotides comprise one or more nucleoside that does not comprise a nucleobase, referred to as an abasic nucleoside.

[0193] In certain embodiments, modified nucleobases are selected from: 5-substituted pyrimidines, 6-azapyrimidines, alkyl or alkynyl substituted pyrimidines, alkyl substituted purines, and N-2, N-6 and 0-6 substituted purines. In certain embodiments, modified nucleobases are selected from: 2-aminopropyladenine, 5-hydroxymethyl cytosine, xanthine, hypoxanthine, 2-aminoadenine, 6-N-methylguanine, 6-N-methyladenine, 2-propyladenine, 2-thiouracil, 2-thiothymine and 2-thiocytosine, 5-propynyl (—C═C—CH₃) uracil, 5-propynylcytosine, 6-azouracil, 6-azocytosine, 6-azothymine, 5-ribosyluracil (pseudouracil), 4-thiouracil, 8-halo, 8-amino, 8-thiol, 8-thioalkyl, 8-hydroxyl, 8-aza and other 8-substituted purines, 5-halo, particularly 5-bromo, 5-trifluoromethyl, 5-halouracil, and 5-halocytosine, 7-methylguanine, 7-methyladenine, 2-F-adenine, 2-aminoadenine, 7-deazaguanine, 7-deazaadenine, 3-deazaguanine, 3-deazaadenine, 6-N-benzoyladenine, 2-N-isobutyrylguanine, 4-N-benzoylcytosine, 4-N-benzoyluracil, 5-methyl 4-N-benzoylcytosine, 5-methyl 4-N-benzoyluracil, universal bases, hydrophobic bases, promiscuous bases, size-expanded bases, and fluorinated bases. Further modified nucleobases include tricyclic pyrimidines, such as 1,3-diazaphenoxazine-2-one, 1,3-diazaphenothiazine-2-one and 9-(2-aminoethoxy)-1,3-diazaphenoxazine-2-one (G-clamp). Modified nucleobases may also include those in which the purine or pyrimidine base is replaced with other heterocycles, for example 7-deaza-adenine, 7-deazaguanosine, 2-aminopyridine and 2-pyridone. Further nucleobases include those disclosed in Merigan et al., U.S. Pat. No. 3,687,808, those disclosed in The Concise Encyclopedia Of Polymer Science And Engineering, Kroschwitz, J. I., Ed., John Wiley & Sons, 1990, 858-859; Englisch et al., Angewandte Chemie, International Edition, 1991, 30, 613; Sanghvi, Y. S., Chapter 15, Antisense Research and Applications, Crooke, S. T. and Lebleu, B., Eds., CRC Press, 1993, 273-288; and those disclosed in Chapters 6 and 15, Antisense Drug Technology, Crooke S. T., Ed., CRC Press, 2008, 163-166 and 442-443.

[0194] Publications that teach the preparation of certain of the above noted modified nucleobases as well as other modified nucleobases include without limitation, Manoharan et al., US2003/0158403; Manoharan et al., US2003/0175906; Dinh et al., U.S. Pat. No. 4,845,205; Spielvogel et al., U.S. Pat. No. 5,130,302; Rogers et al., U.S. Pat. No. 5,134,066; Bischofberger et al., U.S. Pat. No. 5,175,273; Urdea et al., U.S. Pat. No. 5,367,066; Benner et al., U.S. Pat. No. 5,432,272; Matteucci et al., U.S. Pat. No. 5,434,257; Gmeiner et al., U.S. Pat. No. 5,457,187; Cook et al., U.S. Pat. No. 5,459,255; Froehler et al., U.S. Pat. No. 5,484,908; Matteucci et al., U.S. Pat. No. 5,502,177; Hawkins et al., U.S. Pat. No. 5,525,711; Haralambidis et al., U.S. Pat. No. 5,552,540; Cook et al., U.S. Pat. No. 5,587,469; Froehler et al., U.S. Pat. No. 5,594,121; Switzer et al., U.S. Pat. No. 5,596,091; Cook et al., U.S. Pat. No. 5,614,617; Froehler et al., U.S. Pat. No. 5,645,985; Cook et al., U.S. Pat. No. 5,681,941; Cook et al., U.S. Pat. No. 5,811,534; Cook et al., U.S. Pat. No. 5,750,692; Cook et al., U.S. Pat. No. 5,948,903; Cook et al., U.S. Pat. No. 5,587,470; Cook et al., U.S. Pat. No. 5,457,191; Matteucci et al., U.S. Pat. No. 5,763,588; Froehler et al., U.S. Pat. No. 5,830,653; Cook et al., U.S. Pat. No. 5,808,027; Cook et al., 6,166,199; and Matteucci et al., U.S. Pat. No. 6,005,096.

[0195] 3. Certain Modified Internucleoside Linkages

[0196] In certain embodiments, nucleosides of modified oligonucleotides may be linked together using any internucleoside linkage. The two main classes of internucleoside linking groups are defined by the presence or absence of a phosphorus atom. Representative phosphorus-containing internucleoside linkages include but are not limited to phosphates, which contain a phosphodiester bond (“P═O”) (also referred to as unmodified or naturally occurring linkages), phosphotriesters, methylphosphonates, phosphoramidates, and phosphorothioates (“P═S”), and phosphorodithioates (“HS—P═S”). Representative non-phosphorus containing internucleoside linking groups include but are not limited to methylenemethylimino (—CH₂—N(CH₃)—O—CH₂—), thiodiester, thionocarbamate (—O—C(═O)(NH)—S—); siloxane (—O—SiH₂—O—); and N,N′-dimethylhydrazine (—CH₂—N(CH₃)—N(CH₃)—). Modified internucleoside linkages, compared to naturally occurring phosphate linkages, can be used to alter, typically increase, nuclease resistance of the oligonucleotide. In certain embodiments, internucleoside linkages having a chiral atom can be prepared as a racemic mixture, or as separate enantiomers. Methods of preparation of phosphorous-containing and non-phosphorous-containing internucleoside linkages are well known to those skilled in the art.

[0197] Representative internucleoside linkages having a chiral center include but are not limited to alkylphosphonates and phosphorothioates. Modified oligonucleotides comprising internucleoside linkages having a chiral center can be prepared as populations of modified oligonucleotides comprising stereorandom internucleoside linkages, or as populations of modified oligonucleotides comprising phosphorothioate linkages in particular stereochemical configurations. In certain embodiments, populations of modified oligonucleotides comprise phosphorothioate internucleoside linkages wherein all of the phosphorothioate internucleoside linkages are stereorandom. Such modified oligonucleotides can be generated using synthetic methods that result in random selection of the stereochemical configuration of each phosphorothioate linkage. Nonetheless, as is well understood by those of skill in the art, each individual phosphorothioate of each individual oligonucleotide molecule has a defined stereoconfiguration. In certain embodiments, populations of modified oligonucleotides are enriched for modified oligonucleotides comprising one or more particular phosphorothioate internucleoside linkages in a particular, independently selected stereochemical configuration. In certain embodiments, the particular configuration of the particular phosphorothioate linkage is present in at least 65% of the molecules in the population. In certain embodiments, the particular configuration of the particular phosphorothioate linkage is present in at least 70% of the molecules in the population. In certain embodiments, the particular configuration of the particular phosphorothioate linkage is present in at least 80% of the molecules in the population. In certain embodiments, the particular configuration of the particular phosphorothioate linkage is present in at least 90% of the molecules in the population. In certain embodiments, the particular configuration of the particular phosphorothioate linkage is present in at least 99% of the molecules in the population. Such chirally enriched populations of modified oligonucleotides can be generated using synthetic methods known in the art, e.g., methods described in Oka et al., JACS 125, 8307 (2003), Wan et al. Nuc. Acid. Res. 42, 13456 (2014), and WO 2017/015555. In certain embodiments, a population of modified oligonucleotides is enriched for modified oligonucleotides having at least one indicated phosphorothioate in the (Sp) configuration. In certain embodiments, a population of modified oligonucleotides is enriched for modified oligonucleotides having at least one phosphorothioate in the (Rp) configuration. In certain embodiments, modified oligonucleotides comprising (Rp) and/or (Sp) phosphorothioates comprise one or more of the following formulas, respectively, wherein “B” indicates a nucleobase:

[chemical structure]

[0198] Unless otherwise indicated, chiral internucleoside linkages of modified oligonucleotides described herein can be stereorandom or in a particular stereochemical configuration.

[0199] Neutral internucleoside linkages include, without limitation, phosphotriesters, methylphosphonates, MMI (3′-CH₂—N(CH₃)—O-5′), amide-3 (3′-CH₂—C(═O)—N(H)-5′), amide-4 (3′-CH₂—N(H)—C(═O)-5′), formacetal (3′-O—CH₂—O-5′), methoxypropyl, and thioformacetal (3′-S—CH₂—O-5′). Further neutral internucleoside linkages include nonionic linkages comprising siloxane (dialkylsiloxane), carboxylate ester, carboxamide, sulfide, sulfonate ester and amides (See for example: Carbohydrate Modifications in Antisense Research; Y. S. Sanghvi and P. D. Cook, Eds., ACS Symposium Series 580; Chapters 3 and 4, 40-65). Further neutral internucleoside linkages include nonionic linkages comprising mixed N, O, S and CH₂ component parts.

[0200] B. Certain Motifs

[0201] In certain embodiments, modified oligonucleotides comprise one or more modified nucleosides comprising a modified sugar moiety. In certain embodiments, modified oligonucleotides comprise one or more modified nucleosides comprising a modified nucleobase. In certain embodiments, modified oligonucleotides comprise one or more modified internucleoside linkage. In such embodiments, the modified, unmodified, and differently modified sugar moieties, nucleobases, and/or internucleoside linkages of a modified oligonucleotide define a pattern or motif. In certain embodiments, the patterns of sugar moieties, nucleobases, and internucleoside linkages are each independent of one another. Thus, a modified oligonucleotide may be described by its sugar motif, nucleobase motif and/or internucleoside linkage motif (as used herein, nucleobase motif describes the modifications to the nucleobases independent of the sequence of nucleobases).

[0202] 1. Certain Sugar Motifs

[0203] In certain embodiments, oligonucleotides comprise one or more type of modified sugar and/or unmodified sugar moiety arranged along the oligonucleotide or region thereof in a defined pattern or sugar motif. In certain instances, such sugar motifs include but are not limited to any of the sugar modifications discussed herein.

### Uniformly Modified Oligonucleotides

[0204] In certain embodiments, modified oligonucleotides comprise or consist of a region having a fully modified sugar motif. In such embodiments, each nucleoside of the fully modified region of the modified oligonucleotide comprises a modified sugar moiety. In certain embodiments, each nucleoside of the entire modified oligonucleotide comprises a modified sugar moiety. In certain embodiments, modified oligonucleotides comprise or consist of a region having a fully modified sugar motif, wherein each nucleoside within the fully modified region comprises the same modified sugar moiety, referred to herein as a uniformly modified sugar motif. In certain embodiments, a fully modified oligonucleotide is a uniformly modified oligonucleotide.

### Gapmer Oligonucleotides

[0205] In certain embodiments, modified oligonucleotides comprise or consist of a region having a gapmer motif, which is defined by two external regions or “wings” and a central or internal region or “gap.” The three regions of a gapmer motif (the 5′-wing, the gap, and the 3′-wing) form a contiguous sequence of nucleosides wherein at least some of the sugar moieties of the nucleosides of each of the wings differ from at least some of the sugar moieties of the nucleosides of the gap. Specifically, at least the sugar moieties of the nucleosides of each wing that are closest to the gap (the 3′-most nucleoside of the 5′-wing and the 5′-most nucleoside of the 3′-wing) differ from the sugar moiety of the neighboring gap nucleosides, thus defining the boundary between the wings and the gap (i.e., the wing/gap junction). In certain embodiments, the sugar moieties within the gap are the same as one another. In certain embodiments, the gap includes one or more nucleoside having a sugar moiety that differs from the sugar moiety of one or more other nucleosides of the gap. In certain embodiments, the sugar motifs of the two wings are the same as one another (symmetric gapmer). In certain embodiments, the sugar motif of the 5′-wing differs from the sugar motif of the 3′-wing (asymmetric gapmer).

[0206] In certain embodiments, the wings of a gapmer comprise 1-5 nucleosides. In certain embodiments, each nucleoside of each wing of a gapmer is a modified nucleoside. In certain embodiments, at least one nucleoside of each wing of a gapmer is a modified nucleoside. In certain embodiments, at least two nucleosides of each wing of a gapmer are modified nucleosides. In certain embodiments, at least three nucleosides of each wing of a gapmer are modified nucleosides. In certain embodiments, at least four nucleosides of each wing of a gapmer are modified nucleosides.

[0207] In certain embodiments, the gap of a gapmer comprises 7-12 nucleosides. In certain embodiments, each nucleoside of the gap of a gapmer is an unmodified 2′-deoxynucleoside. In certain embodiments, at least one nucleoside of the gap of a gapmer is a modified nucleoside.

[0208] In certain embodiments, the gapmer is a deoxy gapmer. In certain embodiments, the nucleosides on the gap side of each wing/gap junction are unmodified 2′-deoxynucleosides and the nucleosides on the wing sides of each wing/gap junction are modified nucleosides. In certain embodiments, each nucleoside of the gap is an unmodified 2′-deoxynucleoside. In certain embodiments, each nucleoside of each wing of a gapmer is a modified nucleoside.

[0209] In certain embodiments, modified oligonucleotides comprise or consist of a region having a fully modified sugar motif. In such embodiments, each nucleoside of the fully modified region of the modified oligonucleotide comprises a modified sugar moiety. In certain embodiments, each nucleoside of the entire modified oligonucleotide comprises a modified sugar moiety. In certain embodiments, modified oligonucleotides comprise or consist of a region having a fully modified sugar motif, wherein each nucleoside within the fully modified region comprises the same modified sugar moiety, referred to herein as a uniformly modified sugar motif. In certain embodiments, a fully modified oligonucleotide is a uniformly modified oligonucleotide. In certain embodiments, each nucleoside of a uniformly modified comprises the same 2′-modification.

[0210] Herein, the lengths (number of nucleosides) of the three regions of a gapmer may be provided using the notation [#of nucleosides in the 5′-wing]-[#of nucleosides in the gap]-[#of nucleosides in the 3′-wing]. Thus, a 3-10-3 gapmer consists of 3 linked nucleosides in each wing and 10 linked nucleosides in the gap. Where such nomenclature is followed by a specific modification, that modification is the modification in each sugar moiety of each wing and the gap nucleosides comprise unmodified deoxynucleosides sugars. Thus, a 3-10-3 cEt gapmer consists of 3 linked cEt nucleosides in the 5′-wing, 10 linked deoxynucleosides in the gap, and 3 linked cEt nucleosides in the 3′-wing. Similarly, a 2-12-2 cEt gapmer consists of 2 linked cEt nucleosides in the 5′-wing, 12 linked deoxynucleosides in the gap, and 2 linked cEt nucleosides in the 3′-wing.

[0211] In certain embodiments, modified oligonucleotides are 3-10-3 BNA gapmers. In certain embodiments, modified oligonucleotides are 3-10-3 cEt gapmers. In certain embodiments, modified oligonucleotides are 3-10-3 LNA gapmers. In certain embodiments, modified oligonucleotides are 2-12-2 BNA gapmers. In certain embodiments, modified oligonucleotides are 2-12-2 cEt gapmers. In certain embodiments, modified oligonucleotides are 2-12-2 LNA gapmers.

### Antisense RNAi Oligonucleotides

[0212] In certain embodiments, the sugar moiety of at least one nucleoside of an antisense RNAi oligonucleotide is a modified sugar moiety.

[0213] In certain such embodiments, at least one nucleoside of the antisense RNAi oligonucleotide comprises a 2′-OMe modified sugar moiety. In certain embodiments, at least 2 nucleosides comprise 2′-OMe modified sugar moieties. In certain embodiments, at least 5 nucleosides comprise 2′-OMe modified sugar moieties. In certain embodiments, at least 8 nucleosides comprise 2′-OMe modified sugar moieties. In certain embodiments, at least 10 nucleosides comprise 2′-OMe modified sugar moieties. In certain embodiments, at least 12 nucleosides comprise 2′-OMe modified sugar moieties. In certain embodiments, at least 14 nucleosides comprise 2′-OMe modified sugar moieties. In certain embodiments, at least 15 nucleosides comprise 2′-OMe modified sugar moieties. In certain embodiments, at least 17 nucleosides comprise 2′-OMe modified sugar moieties. In certain such embodiments, at least 18 nucleosides comprise 2′-OMe modified sugar moieties. In certain such embodiments, at least 20 nucleosides comprise 2′-OMe modified sugar moieties. In certain embodiments, at least 21 nucleosides comprise 2′-OMe modified sugar moieties. In certain such embodiments, the remainder of the nucleosides are 2′-F modified.

[0214] In certain embodiments, at least one nucleoside of the antisense RNAi oligonucleotide comprises a 2′-F modified sugar moiety. In certain embodiments, at least 2 nucleosides comprise 2′-F modified sugar moieties. In certain embodiments, at least 3 nucleosides comprise 2′-F modified sugar moieties. In certain embodiments, at least 4 nucleosides comprise 2′-F modified sugar moieties. In certain embodiments, one, but not more than one nucleoside comprises a 2′-F modified sugar. In certain embodiments, 1 or 2 nucleosides comprise 2′-F modified sugar moieties. In certain embodiments, 1-3 nucleosides comprise 2′-F modified sugar moieties. In certain embodiments, at least 1-4 nucleosides comprise 2′-F modified sugar moieties. In certain embodiments, antisense RNAi oligonucleotides have a block of 2-4 contiguous 2′-F modified nucleosides. In certain embodiments, 4 nucleosides of an antisense RNAi oligonucleotide are 2′-F modified nucleosides and 3 of those 2′-F modified nucleosides are contiguous. In certain such embodiments, the remainder of the nucleosides are 2′-OMe modified.

[0215] In certain embodiments, at least one nucleoside of the antisense RNAi oligonucleotide comprises a 2′-OMe modified sugar moiety and at least one nucleoside comprises a 2′-F modified sugar moiety. In certain embodiments, at least 1, 2, 3, 4, 5, 6, 7, 8, 9 or 10 nucleosides comprises a 2′-OMe modified sugar moiety and at least 1, 2, 3, 4, 5, 6, 7, 8, 9 or 10 nucleosides comprises a 2′-F modified sugar moiety. In certain embodiments, the antisense RNAi oligonucleotide comprises a sugar motif of fyf or yfy, wherein each “f” represents a 2′-F modified sugar moiety and each “y” represents a 2′-OMe modified sugar moiety. In certain embodiments, the antisense RNAi oligonucleotide has a sugar motif of yfyfyfyfyfyfyfyfyfyfyyy, wherein each “f” represents a 2′-F modified sugar moiety and each “y” represents a 2′-OMe modified sugar moiety.

### Sense RNAi Oligonucleotides

[0216] In certain embodiments, the sugar moiety of at least one nucleoside of a sense RNAi oligonucleotides is a modified sugar moiety.

[0217] In certain such embodiments, at least one nucleoside of the sense RNAi oligonucleotide comprises a 2′-OMe modified sugar moiety. In certain embodiments, at least 2 nucleosides comprise 2′-OMe modified sugar moieties. In certain embodiments, at least 5 nucleosides comprise 2′-OMe modified sugar moieties. In certain embodiments, at least 8 nucleosides comprise 2′-OMe modified sugar moieties. In certain embodiments, at least 10 nucleosides comprise 2′-OMe modified sugar moieties. In certain embodiments, at least 12 nucleosides comprise 2′-OMe modified sugar moieties. In certain embodiments, at least 14 nucleosides comprise 2′-OMe modified sugar moieties. In certain embodiments, at least 15 nucleosides comprise 2′-OMe modified sugar moieties. In certain embodiments, at least 17 nucleosides comprise 2′-OMe modified sugar moieties. In certain such embodiments, at least 18 nucleosides comprise 2′-OMe modified sugar moieties. In certain such embodiments, at least 20 nucleosides comprise 2′-OMe modified sugar moieties. In certain such embodiments, at least 21 nucleosides comprise 2′-OMe modified sugar moieties.

[0218] In certain embodiments, at least one nucleoside of the sense RNAi oligonucleotide comprises a 2′-F modified sugar moiety. In certain embodiments, at least 2 nucleosides comprise 2′-F modified sugar moieties. In certain embodiments, at least 3 nucleosides comprise 2′-F modified sugar moieties. In certain embodiments, at least 4 nucleosides comprise 2′-F modified sugar moieties. In certain embodiments, one, but not more than nucleoside comprises a 2′-F modified sugar moiety. In certain embodiments, 1 or 2 nucleosides comprise 2′-F modified sugar moieties. In certain embodiments, 1-3 nucleosides comprise 2′-F modified sugar moieties. In certain embodiments, at least 1-4 nucleosides comprise 2′-F modified sugar moieties. In certain embodiments, sense RNAi oligonucleotides have a block of 2-4 contiguous 2′-F modified nucleosides. In certain embodiments, 4 nucleosides of a sense RNAi oligonucleotide are 2′-F modified nucleosides and 3 of those 2′-F modified nucleosides are contiguous. In certain such embodiments the remainder of the nucleosides are 2′OMe modified.

[0219] In certain embodiments, at least one nucleoside of the sense RNAi oligonucleotide comprises a 2′-OMe modified sugar moiety and at least one nucleoside comprises a 2′-F modified sugar moiety. In certain embodiments, at least 1, 2, 3, 4, 5, 6, 7, 8, 9 or 10 nucleosides comprises a 2′-OMe modified sugar moiety and at least 1, 2, 3, 4, 5, 6, 7, 8, 9 or 10 nucleosides comprises a 2′-F modified sugar moiety. In certain embodiments, the sense RNAi oligonucleotide comprises a sugar motif of fyf or yfy, wherein each “f” represents a 2′-F modified sugar moiety and each “y” represents a 2′-OMe modified sugar moiety. In certain embodiments, the sense RNAi oligonucleotide has a sugar motif of fyfyfyfyfyfyfyfyfyf, wherein each “f” represents a 2′-F modified sugar moiety and each “y” represents a 2′-OMe modified sugar moiety.

[0220] 2. Certain Nucleobase Motifs

[0221] In certain embodiments, oligonucleotides comprise modified and/or unmodified nucleobases arranged along the oligonucleotide or region thereof in a defined pattern or motif. In certain embodiments, each nucleobase is modified. In certain embodiments, none of the nucleobases are modified. In certain embodiments, each purine or each pyrimidine is modified. In certain embodiments, each adenine is modified. In certain embodiments, each guanine is modified. In certain embodiments, each thymine is modified. In certain embodiments, each uracil is modified. In certain embodiments, each cytosine is modified. In certain embodiments, some or all of the cytosine nucleobases in a modified oligonucleotide are 5-methyl cytosines. In certain embodiments, all of the cytosine nucleobases are 5-methyl cytosines and all of the other nucleobases of the modified oligonucleotide are unmodified nucleobases.

[0222] In certain embodiments, modified oligonucleotides comprise a block of modified nucleobases. In certain such embodiments, the block is at the 3′-end of the oligonucleotide. In certain embodiments the block is within 3 nucleosides of the 3′-end of the oligonucleotide. In certain embodiments, the block is at the 5′-end of the oligonucleotide. In certain embodiments the block is within 3 nucleosides of the 5′-end of the oligonucleotide.

### Gapmer Oligonucleotides

[0223] In certain embodiments, oligonucleotides having a gapmer motif comprise a nucleoside comprising a modified nucleobase. In certain such embodiments, one nucleoside comprising a modified nucleobase is in the central gap of an oligonucleotide having a gapmer motif. In certain such embodiments, the sugar moiety of said nucleoside is a 2′-deoxyribosyl moiety. In certain embodiments, the modified nucleobase is selected from: a 2-thiopyrimidine and a 5-propynepyrimidine.

### Antisense RNAi Oligonucleotides

[0224] In certain embodiments, one nucleoside of an antisense RNAi oligonucleotide is a UNA. In certain embodiments, one nucleoside of an antisense RNAi oligonucleotide is a GNA. In certain embodiments, 1-4 nucleosides of an antisense RNAi oligonucleotide is/are DNA. In certain such embodiments, the 1-4 DNA nucleosides are at one or both ends of the antisense RNAi oligonucleotide.

### Sense RNAi Oligonucleotides

[0225] In certain embodiments, one nucleoside of a sense RNAi oligonucleotide is a UNA. In certain embodiments, one nucleoside of a sense RNAi oligonucleotide is a GNA. In certain embodiments, 1-4 nucleosides of a sense RNAi oligonucleotide is/are DNA. In certain such embodiments, the 1-4 DNA nucleosides are at one or both ends of the sense RNAi oligonucleotide.

[0226] 3. Certain Internucleoside Linkage Motifs

[0227] In certain embodiments, oligonucleotides comprise modified and/or unmodified internucleoside linkages arranged along the oligonucleotide or region thereof in a defined pattern or motif. In certain embodiments, each internucleoside linking group is a phosphodiester internucleoside linkage (P═O). In certain embodiments, each internucleoside linking group of a modified oligonucleotide is a phosphorothioate internucleoside linkage (P═S). In certain embodiments, each internucleoside linkage of a modified oligonucleotide is independently selected from a phosphorothioate internucleoside linkage and phosphodiester internucleoside linkage. In certain embodiments, each phosphorothioate internucleoside linkage is independently selected from a stereorandom phosphorothioate a (Sp) phosphorothioate, and a (Rp) phosphorothioate.

### Gapmer Oligonucleotides

[0228] In certain embodiments, the sugar motif of a modified oligonucleotide is a gapmer and the internucleoside linkages within the gap are all modified. In certain such embodiments, some or all of the internucleoside linkages in the wings are unmodified phosphodiester internucleoside linkages. In certain embodiments, the terminal internucleoside linkages are modified. In certain embodiments, the sugar motif of a modified oligonucleotide is a gapmer, and the internucleoside linkage motif comprises at least one phosphodiester internucleoside linkage in at least one wing, wherein the at least one phosphodiester linkage is not a terminal internucleoside linkage, and the remaining internucleoside linkages are phosphorothioate internucleoside linkages. In certain such embodiments, all of the phosphorothioate linkages are stereorandom. In certain embodiments, all of the phosphorothioate linkages in the wings are (Sp) phosphorothioates, and the gap comprises at least one Sp, Sp, Rp motif. In certain embodiments, populations of modified oligonucleotides are enriched for modified oligonucleotides comprising such internucleoside linkage motifs.

### Antisense RNAi Oligonucleotides

[0229] In certain embodiments, at least one linkage of the antisense RNAi oligonucleotide is a modified linkage. In certain embodiments, the 5′-most linkage (i.e., linking the first nucleoside from the 5′-end to the second nucleoside from the 5′-end) is modified. In certain embodiments, the two 5′-most linkages are modified. In certain embodiments, the first one or 2 linkages from the 3′-end are modified. In certain such embodiments, the modified linkage is a phosphorothioate linkage. In certain embodiments, the remaining linkages are all unmodified phosphodiester linkages. In certain embodiments, antisense RNAi oligonucleotides have an internucleoside linkage motif of ssooooooooooooooooooss, wherein each “s” represents a phosphorothioate internucleoside linkage and each “o” represents a phosphate internucleoside linkage. In certain embodiments, at least one linkage of the antisense RNAi oligonucleotide is an inverted linkage.

### Sense RNAi Oligonucleotides

[0230] In certain embodiments, at least one linkage of the sense RNAi oligonucleotides is a modified linkage. In certain embodiments, the 5′-most linkage (i.e., linking the first nucleoside from the 5′-end to the second nucleoside from the 5′-end) is modified. In certain embodiments, the two 5′-most linkages are modified. In certain embodiments, the first one or 2 linkages from the 3′-end are modified. In certain such embodiments, the modified linkage is a phosphorothioate linkage. In certain embodiments, the remaining linkages are all unmodified phosphodiester linkages. In certain embodiments, sense RNAi oligonucleotides have an internucleoside linkage motif of ssooooooooooooooooss, wherein each “s” represents a phosphorothioate internucleoside linkage and each “o” represents a phosphate internucleoside linkage. In certain embodiments, at least one linkage of the sense RNAi oligonucleotides is an inverted linkage.

[0231] C. Certain Lengths

[0232] It is possible to increase or decrease the length of an oligonucleotide without eliminating activity. For example, in Woolf et al. (Proc. Natl. Acad. Sci. USA 89:7305-7309, 1992), a series of oligonucleotides 13-25 nucleobases in length were tested for their ability to induce cleavage of a target RNA in an oocyte injection model. Oligonucleotides 25 nucleobases in length with 8 or 11 mismatch bases near the ends of the oligonucleotides were able to direct specific cleavage of the target RNA, albeit to a lesser extent than the oligonucleotides that contained no mismatches. Similarly, target specific cleavage was achieved using 13 nucleobase oligonucleotides, including those with 1 or 3 mismatches.

[0233] In certain embodiments, oligonucleotides (including modified oligonucleotides) can have any of a variety of ranges of lengths. In certain embodiments, oligonucleotides consist of X to Y linked nucleosides, where X represents the fewest number of nucleosides in the range and Y represents the largest number nucleosides in the range. In certain such embodiments, X and Y are each independently selected from 8, 9, 10, 11, 12, 13, 14, 15, 16, 17, 18, 19, 20, 21, 22, 23, 24, 25, 26, 27, 28, 29, 30, 31, 32, 33, 34, 35, 36, 37, 38, 39, 40, 41, 42, 43, 44, 45, 46, 47, 48, 49, and 50; provided that X≤Y. For example, in certain embodiments, oligonucleotides consist of 12 to 13, 12 to 14, 12 to 15, 12 to 16, 12 to 17, 12 to 18, 12 to 19, 12 to 20, 12 to 21, 12 to 22, 12 to 23, 12 to 24, 12 to 25, 12 to 26, 12 to 27, 12 to 28, 12 to 29, 12 to 30, 13 to 14, 13 to 15, 13 to 16, 13 to 17, 13 to 18, 13 to 19, 13 to 20, 13 to 21, 13 to 22, 13 to 23, 13 to 24, 13 to 25, 13 to 26, 13 to 27, 13 to 28, 13 to 29, 13 to 30, 14 to 15, 14 to 16, 14 to 17, 14 to 18, 14 to 19, 14 to 20, 14 to 21, 14 to 22, 14 to 23, 14 to 24, 14 to 25, 14 to 26, 14 to 27, 14 to 28, 14 to 29, 14 to 30, 15 to 16, 15 to 17, 15 to 18, 15 to 19, 15 to 20, 15 to 21, 15 to 22, 15 to 23, 15 to 24, 15 to 25, 15 to 26, 15 to 27, 15 to 28, 15 to 29, 15 to 30, 16 to 17, 16 to 18, 16 to 19, 16 to 20, 16 to 21, 16 to 22, 16 to 23, 16 to 24, 16 to 25, 16 to 26, 16 to 27, 16 to 28, 16 to 29, 16 to 30, 17 to 18, 17 to 19, 17 to 20, 17 to 21, 17 to 22, 17 to 23, 17 to 24, 17 to 25, 17 to 26, 17 to 27, 17 to 28, 17 to 29, 17 to 30, 18 to 19, 18 to 20, 18 to 21, 18 to 22, 18 to 23, 18 to 24, 18 to 25, 18 to 26, 18 to 27, 18 to 28, 18 to 29, 18 to 30, 19 to 20, 19 to 21, 19 to 22, 19 to 23, 19 to 24, 19 to 25, 19 to 26, 19 to 29, 19 to 28, 19 to 29, 19 to 30, 20 to 21, 20 to 22, 20 to 23, 20 to 24, 20 to 25, 20 to 26, 20 to 27, 20 to 28, 20 to 29, 20 to 30, 21 to 22, 21 to 23, 21 to 24, 21 to 25, 21 to 26, 21 to 27, 21 to 28, 21 to 29, 21 to 30, 22 to 23, 22 to 24, 22 to 25, 22 to 26, 22 to 27, 22 to 28, 22 to 29, 22 to 30, 23 to 24, 23 to 25, 23 to 26, 23 to 27, 23 to 28, 23 to 29, 23 to 30, 24 to 25, 24 to 26, 24 to 27, 24 to 28, 24 to 29, 24 to 30, 25 to 26, 25 to 27, 25 to 28, 25 to 29, 25 to 30, 26 to 27, 26 to 28, 26 to 29, 26 to 30, 27 to 28, 27 to 29, 27 to 30, 28 to 29, 28 to 30, or 29 to 30 linked nucleosides.

### Antisense RNAi Oligonucleotides

[0234] In certain embodiments, antisense RNAi oligonucleotides consist of 17-30 linked nucleosides. In certain embodiments, antisense RNAi oligonucleotides consist of 17-25 linked nucleosides. In certain embodiments, antisense RNAi oligonucleotides consist of 17-23 linked nucleosides. In certain embodiments, antisense RNAi oligonucleotides consist of 17-21 linked nucleosides. In certain embodiments, antisense RNAi oligonucleotides consist of 18-30 linked nucleosides. In certain embodiments, antisense RNAi oligonucleotides consist of 20-30 linked nucleosides. In certain embodiments, antisense RNAi oligonucleotides consist of 21-30 linked nucleosides. In certain embodiments, antisense RNAi oligonucleotides consist of 23-30 linked nucleosides. In certain embodiments, antisense RNAi oligonucleotides consist of 18-25 linked nucleosides. In certain embodiments, antisense RNAi oligonucleotides consist of 20-22 linked nucleosides. In certain embodiments, antisense RNAi oligonucleotides consist of 21-23 linked nucleosides. In certain embodiments, antisense RNAi oligonucleotides consist of 23-24 linked nucleosides. In certain embodiments, antisense RNAi oligonucleotides consist of 20 linked nucleosides. In certain embodiments, antisense RNAi oligonucleotides consist of 21 linked nucleosides. In certain embodiments, antisense RNAi oligonucleotides consist of 22 linked nucleosides. In certain embodiments, antisense RNAi oligonucleotides consist of 23 linked nucleosides.

### Sense RNAi Oligonucleotides

[0235] In certain embodiments, sense RNAi oligonucleotides consist of 17-30 linked nucleosides. In certain embodiments, sense RNAi oligonucleotides consist of 17-25 linked nucleosides. In certain embodiments, sense RNAi oligonucleotides consist of 17-23 linked nucleosides. In certain embodiments, sense RNAi oligonucleotides consist of 17-21 linked nucleosides. In certain embodiments, sense RNAi oligonucleotides consist of 18-30 linked nucleosides. In certain embodiments, sense RNAi oligonucleotides consist of 20-30 linked nucleosides. In certain embodiments, sense RNAi oligonucleotides consist of 21-30 linked nucleosides. In certain embodiments, sense RNAi oligonucleotides consist of 23-30 linked nucleosides. In certain embodiments, sense RNAi oligonucleotides consist of 18-25 linked nucleosides. In certain embodiments, sense RNAi oligonucleotides consist of 20-22 linked nucleosides. In certain embodiments, sense RNAi oligonucleotides consist of 21-23 linked nucleosides. In certain embodiments, sense RNAi oligonucleotides consist of 23-24 linked nucleosides. In certain embodiments, sense RNAi oligonucleotides consist of 20 linked nucleosides. In certain embodiments, sense RNAi oligonucleotides consist of 21 linked nucleosides. In certain embodiments, sense RNAi oligonucleotides consist of 22 linked nucleosides. In certain embodiments, sense RNAi oligonucleotides consist of 23 linked nucleosides.

[0236] D. Certain Modified Oligonucleotides

[0237] In certain embodiments, the above modifications (sugar, nucleobase, internucleoside linkage) are incorporated into a modified oligonucleotide. In certain embodiments, modified oligonucleotides are characterized by their modification motifs and overall lengths. In certain embodiments, such parameters are each independent of one another. Thus, unless otherwise indicated, each internucleoside linkage of an oligonucleotide having a gapmer sugar motif may be modified or unmodified and may or may not follow the gapmer modification pattern of the sugar modifications. For example, the internucleoside linkages within the wing regions of a sugar gapmer may be the same or different from one another and may be the same or different from the internucleoside linkages of the gap region of the sugar motif. Likewise, such sugar gapmer oligonucleotides may comprise one or more modified nucleobase independent of the gapmer pattern of the sugar modifications. Unless otherwise indicated, all modifications are independent of nucleobase sequence.

[0238] E. Certain Populations of Modified Oligonucleotides

[0239] Populations of modified oligonucleotides in which all of the modified oligonucleotides of the population have the same molecular formula can be stereorandom populations or chirally enriched populations. All of the chiral centers of all of the modified oligonucleotides are stereorandom in a stereorandom population. In a chirally enriched population, at least one particular chiral center is not stereorandom in the modified oligonucleotides of the population. In certain embodiments, the modified oligonucleotides of a chirally enriched population are enriched for β-D ribosyl sugar moieties, and all of the phosphorothioate internucleoside linkages are stereorandom. In certain embodiments, the modified oligonucleotides of a chirally enriched population are enriched for both β-D ribosyl sugar moieties and at least one, particular phosphorothioate internucleoside linkage in a particular stereochemical configuration.

[0240] F. Nucleobase Sequence

[0241] In certain embodiments, oligonucleotides (unmodified or modified oligonucleotides) are further described by their nucleobase sequence. In certain embodiments oligonucleotides have a nucleobase sequence that is complementary to a second oligonucleotide or an identified reference nucleic acid, such as a target nucleic acid. In certain such embodiments, a region of an oligonucleotide has a nucleobase sequence that is complementary to a second oligonucleotide or an identified reference nucleic acid, such as a target nucleic acid. In certain embodiments, the nucleobase sequence of a region or entire length of an oligonucleotide is at least 50%, at least 60%, at least 70%, at least 80%, at least 85%, at least 90%, at least 95%, or 100% complementary to the second oligonucleotide or nucleic acid, such as a target nucleic acid.

[0242] II. Certain Oligomeric Compounds

[0243] In certain embodiments, provided herein are oligomeric compounds, which consist of an oligonucleotide (modified or unmodified) and optionally one or more conjugate groups and/or terminal groups. Conjugate groups consist of one or more conjugate moiety and a conjugate linker which links the conjugate moiety to the oligonucleotide. Conjugate groups may be attached to either or both ends of an oligonucleotide and/or at any internal position. In certain embodiments, conjugate groups are attached to the 2′-position of a nucleoside of a modified oligonucleotide. In certain embodiments, conjugate groups that are attached to either or both ends of an oligonucleotide are terminal groups. In certain such embodiments, conjugate groups or terminal groups are attached at the 3′ and/or 5′-end of oligonucleotides. In certain such embodiments, conjugate groups (or terminal groups) are attached at the 3′-end of oligonucleotides. In certain embodiments, conjugate groups are attached near the 3′-end of oligonucleotides. In certain embodiments, conjugate groups (or terminal groups) are attached at the 5′-end of oligonucleotides. In certain embodiments, conjugate groups are attached near the 5′-end of oligonucleotides.

[0244] Examples of terminal groups include but are not limited to conjugate groups, capping groups, phosphate moieties, protecting groups, modified or unmodified nucleosides, and two or more nucleosides that are independently modified or unmodified.

[0245] A. Certain RNAi Compounds

[0246] RNAi compounds comprise an antisense RNAi oligonucleotide and optionally a sense RNAi oligonucleotide. RNAi compounds may also comprise terminal groups and/or conjugate groups which may be attached to the antisense RNAi oligonucleotide or the sense RNAi oligonucleotide (when present).

[0247] Duplexes

[0248] RNAi compounds comprising an antisense RNAi oligonucleotide and a sense RNAi oligonucleotide form a duplex, because the sense RNAi oligonucleotide comprises an antisense-hybridizing region that is complementary to the antisense RNAi oligonucleotide. In certain embodiments, each nucleobase of the antisense RNAi oligonucleotide and the sense RNAi oligonucleotide are complementary to one another. In certain embodiments, the two RNAi oligonucleotides have at least one mismatch relative to one another.

[0249] In certain embodiments, the antisense hybridizing region constitutes the entire length of the sense RNAi oligonucleotide and the antisense RNAi oligonucleotide. In certain embodiments, one or both of the antisense RNAi oligonucleotide and the sense RNAi oligonucleotide comprise additional nucleosides at one or both ends that do not hybridize (overhanging nucleosides). In certain embodiments, overhanging nucleosides are DNA. In certain embodiments, overhanging nucleosides are linked to each other (where there is more than one) and to the first non-overhanging nucleoside with phosphorothioate linkages.

[0250] B. Certain Conjugate Groups

[0251] In certain embodiments, oligonucleotides are covalently attached to one or more conjugate groups. In certain embodiments, conjugate groups modify one or more properties of the attached oligonucleotide, including but not limited to pharmacodynamics, pharmacokinetics, stability, binding, absorption, tissue distribution, cellular distribution, cellular uptake, charge and clearance. In certain embodiments, conjugate groups impart a new property on the attached oligonucleotide, e.g., fluorophores or reporter groups that enable detection of the oligonucleotide. Certain conjugate groups and conjugate moieties have been described previously, for example: cholesterol moiety (Letsinger et al., Proc. Natl. Acad. Sci. USA, 1989, 86, 6553-6556), cholic acid (Manoharan et al., Bioorg. Med. Chem. Lett., 1994, 4, 1053-1060), a thioether, e.g., hexyl-S-tritylthiol (Manoharan et al., Ann. N. Y. Acad. Sci., 1992, 660, 306-309; Manoharan et al., Bioorg. Med. Chem. Lett., 1993, 3, 2765-2770), a thiocholesterol (Oberhauser et al., Nucl. Acids Res., 1992, 20, 533-538), an aliphatic chain, e.g., do-decan-diol or undecyl residues (Saison-Behmoaras et al., EMBO J., 1991, 10, 1111-1118; Kabanov et al., FEBS Lett., 1990, 259, 327-330; Svinarchuk et al., Biochimie, 1993, 75, 49-54), a phospholipid, e.g., di-hexadecyl-rac-glycerol or triethyl-ammonium 1,2-di-O-hexadecyl-rac-glycero-3-H-phosphonate (Manoharan et al., Tetrahedron Lett., 1995, 36, 3651-3654; Shea et al., Nucl. Acids Res., 1990, 18, 3777-3783), a polyamine or a polyethylene glycol chain (Manoharan et al., Nucleosides & Nucleotides, 1995, 14, 969-973), or adamantane acetic acid a palmityl moiety (Mishra et al., Biochim. Biophys. Acta, 1995, 1264, 229-237), an octadecylamine or hexylamino-carbonyl-oxycholesterol moiety (Crooke et al., J Pharmacol. Exp. Ther., 1996, 277, 923-937), a tocopherol group (Nishina et al., Molecular Therapy Nucleic Acids, 2015, 4, e220; and Nishina et al., Molecular Therapy, 2008, 16, 734-740), or a GalNAc cluster (e.g., WO2014/179620).

[0252] 1. Conjugate Moieties

[0253] Conjugate moieties include, without limitation, intercalators, reporter molecules, polyamines, polyamides, peptides, carbohydrates, vitamin moieties, polyethylene glycols, thioethers, polyethers, cholesterols, thiocholesterols, cholic acid moieties, folate, lipids, phospholipids, biotin, phenazine, phenanthridine, anthraquinone, adamantane, acridine, fluoresceins, rhodamines, coumarins, fluorophores, and dyes.

[0254] In certain embodiments, a conjugate moiety comprises an active drug substance, for example, aspirin, warfarin, phenylbutazone, ibuprofen, suprofen, fen-bufen, ketoprofen, (S)-(+)-pranoprofen, carprofen, dansylsarcosine, 2,3,5-triiodobenzoic acid, fingolimod, flufenamic acid, folinic acid, a benzothiadiazide, chlorothiazide, a diazepine, indo-methicin, a barbiturate, a cephalosporin, a sulfa drug, an antidiabetic, an antibacterial or an antibiotic.

[0255] 2. Conjugate Linkers

[0256] Conjugate moieties are attached to oligonucleotides through conjugate linkers. In certain oligomeric compounds, the conjugate linker is a single chemical bond (i.e., the conjugate moiety is attached directly to an oligonucleotide through a single bond). In certain embodiments, the conjugate linker comprises a chain structure, such as a hydrocarbyl chain, or an oligomer of repeating units such as ethylene glycol, nucleosides, or amino acid units.

[0257] In certain embodiments, a conjugate linker comprises one or more groups selected from alkyl, amino, oxo, amide, disulfide, polyethylene glycol, ether, thioether, and hydroxylamino. In certain such embodiments, the conjugate linker comprises groups selected from alkyl, amino, oxo, amide and ether groups. In certain embodiments, the conjugate linker comprises groups selected from alkyl and amide groups. In certain embodiments, the conjugate linker comprises groups selected from alkyl and ether groups. In certain embodiments, the conjugate linker comprises at least one phosphorus moiety. In certain embodiments, the conjugate linker comprises at least one phosphate group. In certain embodiments, the conjugate linker includes at least one neutral linking group.

[0258] In certain embodiments, conjugate linkers, including the conjugate linkers described above, are bifunctional linking moieties, e.g., those known in the art to be useful for attaching conjugate groups to parent compounds, such as the oligonucleotides provided herein. In general, a bifunctional linking moiety comprises at least two functional groups. One of the functional groups is selected to bind to a particular site on a parent compound and the other is selected to bind to a conjugate group. Examples of functional groups used in a bifunctional linking moiety include but are not limited to electrophiles for reacting with nucleophilic groups and nucleophiles for reacting with electrophilic groups. In certain embodiments, bifunctional linking moieties comprise one or more groups selected from amino, hydroxyl, carboxylic acid, thiol, alkyl, alkenyl, and alkynyl.

[0259] In certain embodiments, a conjugate linker comprises pyrrolidine.

[0260] Examples of conjugate linkers include but are not limited to pyrrolidine, 8-amino-3,6-dioxaoctanoic acid (ADO), succinimidyl 4-(N-maleimidomethyl) cyclohexane-1-carboxylate (SMCC) and 6-aminohexanoic acid (AHEX or AHA). Other conjugate linkers include but are not limited to substituted or unsubstituted C₁-C₁₀ alkyl, substituted or unsubstituted C₂-C₁₀ alkenyl or substituted or unsubstituted C₂-C₁₀ alkynyl, wherein a nonlimiting list of preferred substituent groups includes hydroxyl, amino, alkoxy, carboxy, benzyl, phenyl, nitro, thiol, thioalkoxy, halogen, alkyl, aryl, alkenyl and alkynyl.

[0261] In certain embodiments, conjugate linkers comprise 1-10 linker-nucleosides. In certain embodiments, conjugate linkers comprise 2-5 linker-nucleosides. In certain embodiments, conjugate linkers comprise exactly 3 linker-nucleosides. In certain embodiments, conjugate linkers comprise the TCA motif. In certain embodiments, such linker-nucleosides are modified nucleosides. In certain embodiments such linker-nucleosides comprise a modified sugar moiety. In certain embodiments, linker-nucleosides are unmodified. In certain embodiments, linker-nucleosides comprise an optionally protected heterocyclic base selected from a purine, substituted purine, pyrimidine or substituted pyrimidine. In certain embodiments, a cleavable moiety is a nucleoside selected from uracil, thymine, cytosine, 4-N-benzoylcytosine, 5-methyl cytosine, 4-N-benzoyl-5-methyl cytosine, adenine, 6-N-benzoyladenine, guanine and 2-N-isobutyrylguanine. It is typically desirable for linker-nucleosides to be cleaved from the oligomeric compound after it reaches a target tissue. Accordingly, linker-nucleosides are typically linked to one another and to the remainder of the oligomeric compound through cleavable bonds. In certain embodiments, such cleavable bonds are phosphodiester bonds.

[0262] Herein, linker-nucleosides are not considered to be part of the oligonucleotide. Accordingly, in embodiments in which an oligomeric compound comprises an oligonucleotide consisting of a specified number or range of linked nucleosides and/or a specified percent complementarity to a reference nucleic acid and the oligomeric compound also comprises a conjugate group comprising a conjugate linker comprising linker-nucleosides, those linker-nucleosides are not counted toward the length of the oligonucleotide and are not used in determining the percent complementarity of the oligonucleotide for the reference nucleic acid. For example, an oligomeric compound may comprise (1) a modified oligonucleotide consisting of 8-30 nucleosides and (2) a conjugate group comprising 1-10 linker-nucleosides that are contiguous with the nucleosides of the modified oligonucleotide. The total number of contiguous linked nucleosides in such an oligomeric compound is more than 30. Alternatively, an oligomeric compound may comprise a modified oligonucleotide consisting of 8-30 nucleosides and no conjugate group. The total number of contiguous linked nucleosides in such an oligomeric compound is no more than 30. Unless otherwise indicated conjugate linkers comprise no more than 10 linker-nucleosides. In certain embodiments, conjugate linkers comprise no more than 5 linker-nucleosides. In certain embodiments, conjugate linkers comprise no more than 3 linker-nucleosides. In certain embodiments, conjugate linkers comprise no more than 2 linker-nucleosides. In certain embodiments, conjugate linkers comprise no more than 1 linker-nucleoside.

[0263] In certain embodiments, it is desirable for a conjugate group to be cleaved from the oligonucleotide. For example, in certain circumstances oligomeric compounds comprising a particular conjugate moiety are better taken up by a particular cell type, but once the oligomeric compound has been taken up, it is desirable that the conjugate group be cleaved to release the unconjugated or parent oligonucleotide. Thus, certain conjugate linkers may comprise one or more cleavable moieties. In certain embodiments, a cleavable moiety is a cleavable bond. In certain embodiments, a cleavable moiety is a group of atoms comprising at least one cleavable bond. In certain embodiments, a cleavable moiety comprises a group of atoms having one, two, three, four, or more than four cleavable bonds. In certain embodiments, a cleavable moiety is selectively cleaved inside a cell or subcellular compartment, such as a lysosome. In certain embodiments, a cleavable moiety is selectively cleaved by endogenous enzymes, such as nucleases.

[0264] In certain embodiments, a cleavable bond is selected from among: an amide, an ester, an ether, one or both esters of a phosphodiester, a phosphate ester, a carbamate, or a disulfide. In certain embodiments, a cleavable bond is one or both of the esters of a phosphodiester. In certain embodiments, a cleavable moiety comprises a phosphate or phosphodiester. In certain embodiments, the cleavable moiety is a phosphate linkage between an oligonucleotide and a conjugate moiety or conjugate group.

[0265] In certain embodiments, a cleavable moiety comprises or consists of one or more linker-nucleosides. In certain such embodiments, the one or more linker-nucleosides are linked to one another and/or to the remainder of the oligomeric compound through cleavable bonds. In certain embodiments, such cleavable bonds are unmodified phosphodiester bonds. In certain embodiments, a cleavable moiety is 2′-deoxynucleoside that is attached to either the 3′ or 5′-terminal nucleoside of an oligonucleotide by a phosphate internucleoside linkage and covalently attached to the remainder of the conjugate linker or conjugate moiety by a phosphate or phosphorothioate linkage. In certain such embodiments, the cleavable moiety is 2′-deoxyadenosine.

[0266] C. Certain Terminal Groups

[0267] In certain embodiments, oligomeric compounds comprise one or more terminal groups. In certain such embodiments, oligomeric compounds comprise a stabilized 5′-phophate. Stabilized 5′-phosphates include, but are not limited to 5′-phosphanates, including, but not limited to 5′-vinylphosphonates. In certain embodiments, terminal groups comprise one or more abasic nucleosides and/or inverted nucleosides. In certain embodiments, terminal groups comprise one or more 2′-linked nucleosides. In certain such embodiments, the 2′-linked nucleoside is an abasic nucleoside.

[0268] In certain embodiments, oligomeric compounds comprise one or more terminal groups. In certain such embodiments, modified oligonucleotides comprise a phosphorus-containing group at the 5′-end of the modified oligonucleotide. In certain embodiments, the phosphorus-containing group is at the 5′-end of the antisense RNAi oligonucleotide and/or the sense RNAi oligonucleotide. In certain embodiments, the terminal group is a phosphate stabilized phosphate group. The 5′-end phosphorus-containing group can be 5′-end phosphate (5′-P), 5′-end phosphorothioate (5′-PS), 5′-end phosphorodithioate (5′-PS₂), 5′-end vinylphosphonate (5′-VP), 5′-end methylphosphonate (MePhos) or 5′-deoxy-5′-C-malonyl. When the 5′-end phosphorus-containing group is 5′-end vinylphosphonate, the 5′VP can be either 5′-E-VP isomer (i.e., trans-vinylphosphonate), 5′-Z-VP isomer (i.e., cis-vinylphosphonate), or mixtures thereof. Although such phosphate group can be attached to any modified oligonucleotide, it has particularly been shown that attachment of such a group to an antisense RNAi oligonucleotide improves activity of certain RNAi agents. See, e.g., Prakash et al., Nucleic Acids Res., 43(6):2993-3011, 2015; Elkayam, et al., Nucleic Acids Res., 45(6):3528-3536, 2017; Parmar, et al. ChemBioChem, 17(11)985-989; 2016; Harastzi, et al., Nucleic Acids Res., 45(13):7581-7592, 2017. In certain embodiments, the phosphate stabilizing group is 5′-cyclopropyl phosphonate. See e.g., WO/2018/027106.

[0269] In certain embodiments, terminal groups comprise one or more abasic nucleosides and/or inverted nucleosides. In certain embodiments, terminal groups comprise one or more 2′-linked nucleosides. In certain such embodiments, the 2′-linked nucleoside is an abasic nucleoside.

[0270] D. Certain Specific RNAi Motifs

[0271] RNAi agents can be described by motif or by specific features.

[0272] In certain embodiments, the RNAi agents described herein comprise:

[0273] (a) a sense RNAi oligonucleotide having:
[0274] (i) a length of 21 nucleotides;
[0275] (ii) a conjugate attached to the 3′-end; and
[0276] (iii) 2′-F modifications at positions 1, 3, 5, 7, 9 to 11, 13, 17, 19, and 21, and 2′-OMe modifications at positions 2, 4, 6, 8, 12, 14 to 16, 18, and 20 (counting from the 5′ end);

[0277] and

[0278] (b) an antisense RNAi oligonucleotide having:
[0279] (i) a length of 23 nucleotides;
[0280] (ii) 2′-OMe modifications at positions 1, 3, 5, 9, 11 to 13, 15, 17, 19, 21, and 23, and 2′F modifications at positions 2, 4, 6 to 8, 10, 14, 16, 18, 20, and 22 (counting from the 5′ end); and
[0281] (iii) phosphorothioate internucleoside linkages between nucleoside positions 21 and 22, and between nucleoside positions 22 and 23 (counting from the 5′ end);
[0282] wherein the two nucleotides at the 3′end of the antisense RNAi oligonucleotide are overhanging nucleosides, and the end of the RNAi agent duplex constituting the 5′-end of the antisense RNAi oligonucleotide and the 3′-end of the sense RNAi oligonucleotide is blunt (i.e., neither oligonucleotide has overhang nucleoside at that end and instead the hybridizing region of the sense RNAi oligonucleotide includes the 3′-most nucleoside of the sense RNAi oligonucleotide and that nucleoside hybridizes with the 5′-most nucleoside of the antisense oligonucleotide).

[0283] In certain embodiments, the RNAi agents described herein comprise:

[0284] (a) a sense RNAi oligonucleotide having:
[0285] (i) a length of 21 nucleotides;
[0286] (ii) a conjugate attached to the 3′-end;
[0287] (iii) 2′-F modifications at positions 1, 3, 5, 7, 9 to 11, 13, 17, 19, and 21, and 2′-OMe modifications at positions 2, 4, 6, 8, 12, 14, 16, 18, and 20 (counting from the 5′ end); and
[0288] (iv) phosphorothioate internucleoside linkages between nucleoside positions 1 and 2, and between nucleoside positions 2 and 3 (counting from the 5′ end);

[0289] and

[0290] (b) an antisense RNAi oligonucleotide having:
[0291] (i) a length of 23 nucleotides;
[0292] (ii) 2′-OMe modifications at positions 1, 3, 5, 7, 9, 11 to 13, 15, 17, 19, and 21 to 23, and 2′F modifications at positions 2, 4, 6, 8, 10, 14, 16, 18, and 20 (counting from the 5′ end); and
[0293] (iii) phosphorothioate internucleoside linkages between nucleoside positions 1 and 2, between nucleoside positions 2 and 3, between nucleoside positions 21 and 22, and between nucleoside positions 22 and 23 (counting from the 5′ end);
[0294] wherein the RNAi duplex includes a two nucleotide overhang at the 3′end of the antisense RNAi oligonucleotide, and a blunt end at the 5′-end of the antisense RNAi oligonucleotide.

[0295] In certain embodiments, the RNAi agents described herein comprise:

[0296] (a) a sense RNAi oligonucleotide having:
[0297] (i) a length of 21 nucleotides;
[0298] (ii) a conjugate attached to the 3′-end;
[0299] (iii) 2′-OMe modifications at positions 1 to 6, 8, 10, and 12 to 21, and 2′-F modifications at positions 7 and 9, and a deoxynucleotide at position 11 (counting from the 5′ end); and
[0300] (iv) phosphorothioate internucleoside linkages between nucleoside positions 1 and 2, and between nucleoside positions 2 and 3 (counting from the 5′ end);

[0301] and

[0302] (b) an antisense RNAi oligonucleotide having:
[0303] (i) a length of 23 nucleotides;
[0304] (ii) 2′-OMe modifications at positions 1, 3, 7, 9, 11, 13, 15, 17, and 19 to 23, and 2′F modifications at positions 2, 4 to 6, 8, 10, 12, 14, 16, and 18 (counting from the 5′ end); and
[0305] (iii) phosphorothioate internucleoside linkages between nucleoside positions 1 and 2, between nucleoside positions 2 and 3, between nucleoside positions 21 and 22, and between nucleoside positions 22 and 23 (counting from the 5′ end);
[0306] wherein the RNAi duplex has a two nucleotide overhang at the 3′end of the antisense RNAi oligonucleotide, and a blunt end at the 5′-end of the antisense RNAi oligonucleotide.

[0307] In certain embodiments, the RNAi agents described herein comprise:

[0308] (a) a sense RNAi oligonucleotide having:
[0309] (i) a length of 21 nucleotides;
[0310] (ii) a conjugate attached to the 3′-end;
[0311] (iii) 2′-OMe modifications at positions 1 to 6, 8, and 12 to 21, and 2′-F modifications at positions 7, and 9 to 11; and
[0312] (iv) phosphorothioate internucleoside linkages between nucleoside positions 1 and 2, and between nucleoside positions 2 and 3 (counting from the 5′ end);

[0313] and

[0314] (b) an antisense RNAi oligonucleotide having:
[0315] (i) a length of 23 nucleotides;
[0316] (ii) 2′-OMe modifications at positions 1, 3 to 5, 7, 8, 10 to 13, 15, and 17 to 23, and 2′F modifications at positions 2, 6, 9, 14, and 16 (counting from the 5′ end); and
[0317] (iii) phosphorothioate internucleoside linkages between nucleoside positions 1 and 2, between nucleoside positions 2 and 3, between nucleoside positions 21 and 22, and between nucleoside positions 22 and 23 (counting from the 5′ end);
[0318] wherein the RNAi duplex has a two nucleotide overhang at the 3′end of the antisense RNAi oligonucleotide, and a blunt end at the 5′-end of the antisense RNAi oligonucleotide.

[0319] In certain embodiments, the RNAi agents described herein comprise:

[0320] (a) a sense RNAi oligonucleotide having:
[0321] (i) a length of 21 nucleotides;
[0322] (ii) a conjugate attached to the 3′-end;
[0323] (iii) 2′-OMe modifications at positions 1 to 6, 8, and 12 to 21, and 2′-F modifications at positions 7, and 9 to 11; and
[0324] (iv) phosphorothioate internucleoside linkages between nucleoside positions 1 and 2, and between nucleoside positions 2 and 3 (counting from the 5′ end);

[0325] and

[0326] (b) an antisense RNAi oligonucleotide having:
[0327] (i) a length of 23 nucleotides;
[0328] (ii) 2′-OMe modifications at positions 1, 3 to 5, 7, 10 to 13, 15, and 17 to 23, and 2′F modifications at positions 2, 6, 8, 9, 14, and 16 (counting from the 5′ end); and
[0329] (iii) phosphorothioate internucleoside linkages between nucleoside positions 1 and 2, between nucleoside positions 2 and 3, between nucleoside positions 21 and 22, and between nucleoside positions 22 and 23 (counting from the 5′ end);
[0330] wherein the RNAi duplex has a two nucleotide overhang at the 3′end of the antisense RNAi oligonucleotide, and a blunt end at the 5′-end of the antisense RNAi oligonucleotide.

[0331] In certain embodiments, the RNAi agents described herein comprise:

[0332] (a) a sense RNAi oligonucleotide having:
[0333] (i) a length of 19 nucleotides;
[0334] (ii) a conjugate attached to the 3′-end;
[0335] (iii) 2′-OMe modifications at positions 1 to 4, 6, and 10 to 19, and 2′-F modifications at positions 5, and 7 to 9; and
[0336] (iv) phosphorothioate internucleoside linkages between nucleoside positions 1 and 2, and between nucleoside positions 2 and 3 (counting from the 5′ end);

[0337] and

[0338] (b) an antisense RNAi oligonucleotide having:
[0339] (i) a length of 21 nucleotides;
[0340] (ii) 2′-OMe modifications at positions 1, 3 to 5, 7, 10 to 13, 15, and 17 to 21, and 2′F modifications at positions 2, 6, 8, 9, 14, and 16 (counting from the 5′ end); and
[0341] (iii) phosphorothioate internucleoside linkages between nucleoside positions 1 and 2, between nucleoside positions 2 and 3, between nucleoside positions 19 and 20, and between nucleoside positions 20 and 21 (counting from the 5′ end);
[0342] wherein the RNAi duplex has a two nucleotide overhang at the 3′end of the antisense RNAi oligonucleotide, and a blunt end at the 5′-end of the antisense RNAi oligonucleotide.

[0343] In certain embodiments, the RNAi agents described herein comprise:

[0344] (a) a sense RNAi oligonucleotide having:
[0345] (i) a length of 21 nucleotides;
[0346] (ii) a conjugate attached at position 6 (counting from the 5′ end);
[0347] (iii) 2′-F modifications at positions 7 and 9 to 11, and 2′-OMe modifications at positions 1 to 5, 8, and 12 to 21 (counting from the 5′ end); and
[0348] (iv) phosphorothioate internucleoside linkages between nucleoside positions 1 and 2, between nucleoside positions 2 and 3, between nucleoside positions 19 and 20, and between nucleoside positions 20 and 21 (counting from the 5′ end);

[0349] and

[0350] (b) an antisense RNAi oligonucleotide having:
[0351] (i) a length of 23 nucleotides;
[0352] (ii) 2′-OMe modifications at positions 1, 3 to 5, 7, 10 to 13, 15, and 17 to 23, and 2′F modifications at positions 2, 6, 8, 9, 14, and 16 (counting from the 5′ end);
[0353] (iii) phosphorothioate internucleoside linkages between nucleoside positions 1 and 2, between nucleoside positions 2 and 3, between nucleoside positions 21 and 22, and between nucleoside positions 22 and 23 (counting from the 5′ end); and
[0354] (iv) a stabilized phosphate group attached to the 5′ position of the 5′-most nucleoside;
[0355] wherein the RNAi duplex includes a two nucleotide overhang at the 3′end of the antisense RNAi oligonucleotide, and a blunt end at the 5′-end of the antisense RNAi oligonucleotide.

[0356] In certain embodiments, the RNAi agents described herein comprise:

[0357] (a) a sense RNAi oligonucleotide having:
[0358] (i) a length of 21 nucleotides;
[0359] (ii) a conjugate attached to the 3′-end;
[0360] (iii) 2′-F modifications at positions 7 and 9 to 11, and 2′-OMe modifications at positions 1 to 6, 8, and 12 to 21 (counting from the 5′ end);
[0361] (iv) phosphorothioate internucleoside linkages between nucleoside positions 1 and 2 and between nucleoside positions 2 and 3 (counting from the 5′ end);

[0362] and

[0363] (b) an antisense RNAi oligonucleotide having:
[0364] (i) a length of 23 nucleotides;
[0365] (ii) 2′-OMe modifications at positions 1, 3 to 5, 7 to 13, 15, and 17 to 23 an (S)-GNA modification at position 6, and 2′F modifications at positions 2, 14, and 16 (counting from the 5′ end); and
[0366] (iii) phosphorothioate internucleoside linkages between nucleoside positions 1 and 2, between nucleoside positions 2 and 3, between nucleoside positions 21 and 22, and between nucleoside positions 22 and 23 (counting from the 5′ end);
[0367] wherein the RNAi duplex includes a two nucleotide overhang at the 3′end of the antisense RNAi oligonucleotide, and a blunt end at the 5′-end of the antisense RNAi oligonucleotide.

[0368] In certain embodiments, the RNAi agents described herein comprise:

[0369] (a) a sense RNAi oligonucleotide having:
[0370] (i) a length of 21 nucleotides;
[0371] (ii) a conjugate attached to the 3′-end;
[0372] (iii) 2′-F modifications at positions 7 and 9 to 11, and 2′-OMe modifications at positions 1 to 6, 8, and 12 to 21 (counting from the 5′ end);
[0373] (iv) phosphorothioate internucleoside linkages between nucleoside positions 1 and 2 and between nucleoside positions 2 and 3 (counting from the 5′ end);

[0374] and

[0375] (b) an antisense RNAi oligonucleotide having:
[0376] (i) a length of 23 nucleotides;
[0377] (ii) 2′-OMe modifications at positions 1, 3 to 6, 8 to 13, 15, and 17 to 23 an (S)-GNA modification at position 7, and 2′F modifications at positions 2, 14, and 16 (counting from the 5′ end); and
[0378] (iii) phosphorothioate internucleoside linkages between nucleoside positions 1 and 2, between nucleoside positions 2 and 3, between nucleoside positions 21 and 22, and between nucleoside positions 22 and 23 (counting from the 5′ end);
[0379] wherein the RNAi duplex includes a two nucleotide overhang at the 3′end of the antisense RNAi oligonucleotide, and a blunt end at the 5′-end of the antisense RNAi oligonucleotide.

[0380] In certain embodiments, the RNAi agents described herein comprise:

[0381] (a) a sense RNAi oligonucleotide having:
[0382] (i) a length of 21 nucleotides;
[0383] (ii) a conjugate attached at position 6 (counting from the 5′ end); and
[0384] (iii) 2′-F modifications at positions 7 and 9 to 11, and 2′-OMe modifications at positions 1 to 5, 8, and 12 to 21 (counting from the 5′ end);
[0385] (iv) phosphorothioate internucleoside linkages between nucleoside positions 1 and 2, between nucleoside positions 2 and 3, between nucleoside positions 19 and 20, and between nucleoside positions 20 and 21 (counting from the 5′ end);

[0386] and

[0387] (b) an antisense RNAi oligonucleotide having:
[0388] (i) a length of 23 nucleotides;
[0389] (ii) 2′-OMe modifications at positions 1, 3 to 5, 7 to 13, 15, and 17 to 23 an (S)-GNA modification at position 6, and 2′F modifications at positions 2, 14, and 16 (counting from the 5′ end);
[0390] (iii) phosphorothioate internucleoside linkages between nucleoside positions 1 and 2, between nucleoside positions 2 and 3, between nucleoside positions 21 and 22, and between nucleoside positions 22 and 23 (counting from the 5′ end); and
[0391] (iv) a stabilized phosphate group attached to the 5′ position of the 5′-most nucleoside;
[0392] wherein the RNAi duplex includes a two nucleotide overhang at the 3′end of the antisense RNAi oligonucleotide, and a blunt end at the 5′-end of the antisense RNAi oligonucleotide.

[0393] In certain embodiments, the RNAi agents described herein comprise:

[0394] (a) a sense RNAi oligonucleotide having:
[0395] (i) a length of 21 nucleotides;
[0396] (ii) a conjugate attached at position 6 (counting from the 5′ end);
[0397] (iii) 2′-F modifications at positions 7 and 9 to 11, and 2′-OMe modifications at positions 1 to 5, 8, and 12 to 21 (counting from the 5′ end); and
[0398] (iv) phosphorothioate internucleoside linkages between nucleoside positions 1 and 2, between nucleoside positions 2 and 3, between nucleoside positions 19 and 20, and between nucleoside positions 20 and 21 (counting from the 5′ end);

[0399] and

[0400] (b) an antisense RNAi oligonucleotide having:
[0401] (i) a length of 23 nucleotides;
[0402] (ii) 2′-OMe modifications at positions 1, 3 to 6, 8 to 13, 15, and 17 to 23 an (S)-GNA modification at position 7, and 2′F modifications at positions 2, 14, and 16 (counting from the 5′ end);
[0403] (iii) phosphorothioate internucleoside linkages between nucleoside positions 1 and 2, between nucleoside positions 2 and 3, between nucleoside positions 21 and 22, and between nucleoside positions 22 and 23 (counting from the 5′ end); and
[0404] (iv) a stabilized phosphate group attached to the 5′ position of the 5′-most nucleoside;
[0405] wherein the two nucleotides at the 3′end of the antisense RNAi oligonucleotide are overhanging nucleosides, and the end of the RNAi agent duplex constituting the 5′-end of the antisense RNAi oligonucleotide and the 3′-end of the sense RNAi oligonucleotide is blunt (i.e., neither oligonucleotide has overhang nucleoside at that end and instead the hybridizing region of the sense RNAi oligonucleotide includes the 3′-most nucleoside of the sense RNAi oligonucleotide and that nucleoside hybridizes with the 5′-most nucleoside of the antisense oligonucleotide).

[0406] In certain embodiments, the RNAi agents described herein comprise:

[0407] (a) a sense RNAi oligonucleotide having:
[0408] (i) a length of 21 nucleotides;
[0409] (ii) a conjugate attached to the 5′-end;
[0410] (iii) 2′-OMe modifications at positions 1 to 8, and 12 to 21, and 2′-F modifications at positions 9 to 11; and
[0411] (iv) inverted abasic sugar moieties attached to both the 5′-most and 3′-most nucleosides;

[0412] and

[0413] (b) an antisense RNAi oligonucleotide having:
[0414] (i) a length of 21 nucleotides;
[0415] (ii) 2′-OMe modifications at positions 1, 3, 5, 7, 9, 11, 13, 15, 17, 19, and 21, and 2′F modifications at positions 2, 4, 6, 8, 10, 12, 14, 16, 18, and 20 (counting from the 5′ end); and
[0416] (iii) phosphorothioate internucleoside linkages between nucleoside positions 1 and 2, between nucleoside positions 2 and 3, between nucleoside positions 3 and 4, and between nucleoside positions 20 and 21 (counting from the 5′ end).

[0417] In certain embodiments, the RNAi agents described herein comprise:

[0418] (a) a sense RNAi oligonucleotide having:
[0419] (i) a length of 21 nucleotides;
[0420] (ii) a conjugate attached to the 5′-end;
[0421] (iii) 2′-OMe modifications at positions 1 to 8, and 12 to 21, and 2′-F modifications at positions 9 to 11;
[0422] (iv) a phosphorothioate internucleoside linkage between nucleoside positions 1 and 2 (counting from the 5′ end); and
[0423] (v) an inverted abasic sugar moiety attached to the 3′-most nucleoside;

[0424] and

[0425] (b) an antisense RNAi oligonucleotide having:
[0426] (i) a length of 21 nucleotides;
[0427] (ii) 2′-OMe modifications at positions 1, 3, 5, 7, 9, 11, 13, 15, 17, 19, and 21, and 2′F modifications at positions 2, 4, 6, 8, 10, 12, 14, 16, 18, and 20 (counting from the 5′ end); and
[0428] (iii) phosphorothioate internucleoside linkages between nucleoside positions 1 and 2, between nucleoside positions 2 and 3, between nucleoside positions 3 and 4, and between nucleoside positions 20 and 21 (counting from the 5′ end).

[0429] In certain embodiments, the RNAi agents described herein comprise:

[0430] (a) a sense RNAi oligonucleotide having:
[0431] (i) a length of 19 nucleotides;
[0432] (ii) a conjugate attached to the 5′-end;
[0433] (iii) 2′-OMe modifications at positions 2, 4, 6, 8, 10, 12, 14, 16, 18, and 20, and 2′-F modifications at positions 1, 3, 5, 7, 9, 11, 13, 15, 17, 19, and 21; and
[0434] (iv) phosphorothioate internucleoside linkages between nucleoside positions 17 and 18, and between nucleoside positions 18 and 19 (counting from the 5′ end);

[0435] and

[0436] (b) an antisense RNAi oligonucleotide having:
[0437] (i) a length of 19 nucleotides;
[0438] (ii) 2′-OMe modifications at positions 1, 3, 5, 7, 9, 11, 13, 15, 17, 19, and 21, and 2′F modifications at positions 2, 4, 6, 8, 10, 12, 14, 16, 18, and 20 (counting from the 5′ end); and
[0439] (iii) phosphorothioate internucleoside linkages between nucleoside positions 1 and 2, between nucleoside positions 2 and 3, between nucleoside positions 17 and 18, and between nucleoside positions 18 and 19 (counting from the 5′ end).

[0440] In any of the above embodiments, the conjugate at the 3′-end of the sense RNAi oligonucleotide may comprise a targeting moiety. In certain such embodiments, the targeting moiety targets a neurotransmitter receptor. In certain embodiments, the cell targeting moiety targets a neurotransmitter transporter. In certain embodiments, the cell targeting moiety targets a GABA transporter. See e.g., WO 2011/131693, WO 2014/064257.

[0441] In certain embodiments, the RNAi agent comprises a 21 nucleotide sense RNAi oligonucleotide and a 23 nucleotide antisense RNAi oligonucleotide, wherein the sense RNAi oligonucleotide contains at least one motif of three contiguous 2′-F modified nucleosides at positions 9, 10, 11 from the 5′-end; the antisense RNAi oligonucleotide contains at least one motif of three 2′-O-methyl modifications on three consecutive nucleotides at positions 11, 12, 13 from the 5′ end, wherein one end of the RNAi agent is blunt, while the other end comprises a 2 nucleotide overhang. Preferably, the 2 nucleotide overhang is at the 3′-end of the antisense RNAi oligonucleotide.

[0442] In certain embodiments, when the 2 nucleotide overhang is at the 3′-end of the antisense RNAi oligonucleotide, there may be two phosphorothioate internucleoside linkages between the terminal three nucleotides, wherein two of the three nucleotides are the overhang nucleotides, and the third nucleotide is a paired nucleotide next to the overhang nucleotide. In certain embodiments, the RNAi agent additionally has two phosphorothioate internucleoside linkages between the terminal three nucleotides at both the 5′-end of the sense RNAi oligonucleotide and at the 5′-end of the antisense RNAi oligonucleotide. In certain embodiments, every nucleotide in the sense RNAi oligonucleotide and the antisense RNAi oligonucleotide of the RNAi agent is a modified nucleotide. In certain embodiments, each nucleotide is independently modified with a 2′-O-methyl or 3′-fluoro, e.g. in an alternating motif Optionally, the RNAi agent comprises a conjugate.

[0443] In certain embodiments, every nucleotide in the sense RNAi oligonucleotide and antisense RNAi oligonucleotide of the RNAi agent, including the nucleotides that are part of the motifs, may be modified. Each nucleotide may be modified with the same or different modification, which can include one or more alteration of one or both of the non-linking phosphate oxygens; alteration of a constituent of the ribose sugar, e.g., of the 2′ hydroxyl on the ribose sugar; wholesale replacement of the phosphate moiety with “dephospho” linkers; modification or replacement of a naturally occurring base; and replacement or modification of the ribose-phosphate backbone.

[0444] In certain embodiments, each nucleoside of the sense RNAi oligonucleotide and antisense RNAi oligonucleotide is independently modified with LNA, cEt, UNA, HNA, CeNA, 2′-MOE, 2′-OMe, 2′-O-allyl, 2′-C-allyl, 2′-deoxy, 2′-hydroxyl, or 2′-fluoro. The RNAi agent can contain more than one modification. In one embodiment, each nucleoside of the sense RNAi oligonucleotide and antisense RNAi oligonucleotide is independently modified with 2′-O-methyl or 2′-F. In certain embodiments, the modification is a 2′-NMA modification.

[0445] The term “alternating motif” as used herein refers to a motif having one or more modifications, each modification occurring on alternating nucleotides of one RNAi oligonucleotide. The alternating nucleotide may refer to one per every other nucleotide or one per every three nucleotides, or a similar pattern. For example, if A, B and C each represent one type of modification to the nucleotide, the alternating motif can be “ABABABABABAB . . . ,” “AABBAABBAABB . . . ,” “AABAABAABAAB . . . ,” “AAABAAABAAAB . . . ,” “AAABBBAAABBB . . . ,” or “ABCABCABCABC . . . ,” etc.

[0446] The type of modifications contained in the alternating motif may be the same or different. For example, if A, B, C, D each represent one type of modification on the nucleotide, the alternating pattern, i.e., modifications on every other nucleotide, may be the same, but each of the sense RNAi oligonucleotide or antisense RNAi oligonucleotide can be selected from several possibilities of modifications within the alternating motif such as “ABABAB . . . ”, “ACACAC . . . ” “BDBDBD . . . ” or “CDCDCD . . . ,” etc.

[0447] In certain embodiments, the modification pattern for the alternating motif on the sense RNAi oligonucleotide relative to the modification pattern for the alternating motif on the antisense RNAi oligonucleotide is shifted. The shift may be such that the group of modified nucleotides of the sense RNAi oligonucleotide corresponds to a group of differently modified nucleotides of the antisense RNAi oligonucleotide and vice versa. For example, the sense RNAi oligonucleotide when paired with the antisense RNAi oligonucleotide in the RNAi duplex, the alternating motif in the sense RNAi oligonucleotide may start with “ABABAB” from 5′-3′ of the RNAi oligonucleotide and the alternating motif in the antisense RNAi oligonucleotide may start with “BABABA” from 5′-3′ of the RNAi oligonucleotide within the duplex region. As another example, the alternating motif in the sense RNAi oligonucleotide may start with “AABBAABB” from 5′-3′ of the RNAi oligonucleotide and the alternating motif in the antisense RNAi oligonucleotide may start with “BBAABBAA” from 5′-3′ of the RNAi oligonucleotide within the duplex region, so that there is a complete or partial shift of the modification 10 patterns between the sense RNAi oligonucleotide and the antisense RNAi oligonucleotide.

[0448] In certain embodiments, the RNAi agent comprising the pattern of the alternating motif of 2′-O-methyl modification and 2′-F modification on the sense RNAi oligonucleotide initially has a shift relative to the pattern of the alternating motif of 2′-O-methyl modification and 2′-F modification on the antisense RNAi oligonucleotide initially, i.e., the 2′-O-methyl modified nucleotide on the sense RNAi oligonucleotide base pairs with a 2′-F modified nucleotides on the antisense RNAi oligonucleotide and vice versa. The 1 position of the sense RNAi oligonucleotide may start with the 2′-F modification, and the 1 position of the antisense RNAi oligonucleotide may start with a 2′-O-methyl modification.

[0449] The introduction of one or more motifs of three identical modifications on three consecutive nucleotides to the sense RNAi oligonucleotide and/or antisense RNAi oligonucleotide interrupts the initial modification pattern present in the sense RNAi oligonucleotide and/or antisense RNAi oligonucleotide. This interruption of the modification pattern of the sense and/or antisense RNAi oligonucleotide by introducing one or more motifs of three identical modifications on three consecutive nucleotides to the sense and/or antisense RNAi oligonucleotide surprisingly enhances the gene silencing activity to the target gene. In one embodiment, when the motif of three identical modifications on three consecutive 25 nucleotides is introduced to any of the RNAi oligonucleotide s, the modification of the nucleotide next to the motif is a different modification than the modification of the motif. For example, the portion of the sequence containing the motif is “ . . . NaYYYNb,” where “Y” represents the modification of the motif of three identical modifications on three consecutive nucleotide, and “Na” and “Nb” represent a modification to the nucleotide next to the motif “YYY” that is different than the modification of Y, and where Na and Nb can be the same or different modifications. Alternatively, Na and/or Nb may be present or absent when there is a wing modification present.

[0450] In certain embodiments, the sense RNAi oligonucleotide may be represented by formula (I):

5′nₚ-Nₐ—(X X X)i-N_{b}—Y Y Y—N_{b}—(Z Z Z)ᵣNₐ-n_{q}3′ (I)

[0451] wherein:

[0452] i and j are each independently 0 or 1;

[0453] p and q are each independently 0-6;

[0454] each Nₐ independently represents 0-25 linked nucleosides comprising at least two differently modified nucleosides;

[0455] each N_{b} independently represents 0-10 linked nucleosides;

[0456] each nₚ and n_{q} independently represent an overhanging nucleoside;

[0457] wherein N_{b} and Y do not have the same modification; and

[0458] XXX, YYY and ZZZ each independently represent modified nucleosides where each X nucleoside has the same modification; each Y nucleoside has the same modification; and each Z nucleoside has the same modification. In certain embodiments, each Y comprises a 2′-F modification.

[0459] In certain embodiments, the Nₐ and N_{b} comprise modifications of alternating patterns.

[0460] In certain embodiments, the YYY motif occurs at or near the cleavage site of the target nucleic acid. For example, when the RNAi agent has a duplex region of 17-23 nucleotides in length, the YYY motif can occur at or near the vicinity of the cleavage site (e.g., can occur at positions 6, 7, 8; 7, 8, 9; 8, 9, 10; 9, 10, 11; 10, 11, 12; or 11, 12, 13) of the sense RNAi oligonucleotide, the count starting from the 1′ nucleotide from the 5′-end; or optionally, the count starting at the 1′ paired nucleotide within the duplex region, from the 5′-end.

[0461] In certain embodiments, the antisense RNAi oligonucleotide of the RNAi may be represented by the formula:

5′n_{q}-Nₐ′—(Z′Z′Z′)ₖ—N_{b}′—Y′Y′Y′—N_{b}′—(X′X′X′)ₗ—N′ₐ-nₚ 3′ (II)

[0462] wherein:

[0463] k and l are each independently 0 or 1;

[0464] p′ and q′ are each independently 0-6;

[0465] each Nₐ′ independently represents 0-25 linked nucleotides comprising at least two differently modified nucleotides;

[0466] each N_{b}′ independently represents 0-10 linked nucleotides;

[0467] each nₚ′ and n′ independently represent an overhanging nucleoside;

[0468] wherein N_{b}′ and Y′ do not have the same modification; and

[0469] X′X′X′, Y′Y′Y′ and Z′Z′Z′ each independently represent modified nucleosides where each X′ nucleoside has the same modification; each Y′ nucleoside has the same modification; and each Z′ nucleoside has the same modification. In certain embodiments, each Y′ comprises a 2′-F modification. In certain embodiments, each Y′ comprises a 2′-OMe modification.

[0470] In certain embodiments, the Nₐ′ and/or N_{b}′ comprise modifications of alternating patterns.

[0471] In certain embodiments, the Y′Y′Y′ motif occurs at or near the cleavage site of the target nucleic acid. For example, when the RNAi agent has a duplex region of 17-23 nucleotides in length, the Y′Y′Y′ motif can occur at positions 9, 10, 11; 10, 11, 12; 11, 12, 13; 12, 13, 14; or 13, 14, 15 of the antisense RNAi oligonucleotide, with the count starting from the 1′ nucleotide from the 5′-end; or, optionally, the count starting at the 1′ paired nucleotide within the duplex region, from the 5′-end. Preferably, the Y′Y′Y′ motif occurs at positions 11, 12, 13.

[0472] In certain embodiments, k is 1 and 1 is 0, or k is 0 and 1 is 1, or both k and l are 1.

[0473] The antisense RNAi oligonucleotide can therefore be represented by the following formulas:

5′n_{q}′—Nₐ′—Z′Z′Z′—N_{b}′—Y′Y′Y′—Nₐ′-nₚ′3′ (IIb);

5′n_{q}′—Nₐ′—Y′Y′Y′—N_{b}′—X′X′X′-nₚ′3′ (IIc); or

5′n_{q}′—Nₐ′—Z′Z′Z′—N_{b}′—Y′Y′Y′—N_{b}′—X′X′X′—Nₐ′-nₚ′3′ (IId).

[0474] When the antisense RNAi oligonucleotide is represented by formula IIb, N_{b}′ represents 0-10, 0-7, 0-5, 0-4, 0-2, or 0 linked nucleosides. Each Nₐ′ independently represents 2-20, 2-15, or 2-10 linked nucleosides.

[0475] When the antisense RNAi oligonucleotide is represented by formula IIc, N_{b}′ represents 0-10, 0-7, 0-5, 0-4, 0-2, or 0 linked nucleosides. Each Nₐ′ independently represents 2-20, 2-15, or 2-10 linked nucleosides.

[0476] When the antisense RNAi oligonucleotide is represented by formula IId, N_{b}′ represents 0-10, 0-7, 0-5, 0-4, 0-2, or 0 linked nucleosides. Each Nₐ′ independently represents 2-20, 2-15, or 2-10 linked nucleosides. Preferably, N_{b}′ is 0, 1, 2, 3, 4, 5, or 6.

[0477] In certain embodiments, k is 0 and 1 is 0 and the antisense RNAi oligonucleotide may be represented by the formula:

5′nₚ′—Nₐ′—Y′Y′Y′—Nₐ′-n_{q}′3′ (Ia).

[0478] When the antisense RNAi oligonucleotide is represented by formula IIa, each Nₐ′ independently represents 2-20, 2-15, or 2-10 linked nucleosides.

[0479] Each X′, Y′, and Z′ may be the same or different from each other.

[0480] Each nucleotide of the sense RNAi oligonucleotide and antisense RNAi oligonucleotide may be independently modified with LNA, UNA, cEt, HNA, CeNA, 2′-methoxyethyl, 2′-O-methyl, 2′-O-allyl, 2′-C-allyl, 2′-hydroxyl, or 2′-fluoro. For example, each nucleotide of the sense RNAi oligonucleotide and antisense RNAi oligonucleotide is independently modified with, 2′-O-methyl or 2′-fluoro. Each X, Y, Z, X′, Y′, and Z′, in particular, may represent a 2′-O-methyl modification or 2′-fluoro modification. In certain embodiments, the modification is a 2′-NMA modification.

[0481] In certain embodiments, the sense RNAi oligonucleotide of the RNAi agent may contain YYY motif occurring at 9, 10, and 11 positions of the RNAi oligonucleotide when the duplex region is 21 nucleotides, the count starting from the 1′ nucleotide from the 5′-end, or optionally, the count starting at the 1′ paired nucleotide within the duplex region, from the 5′-end; and Y represents 2′-F modification. The sense RNAi oligonucleotide may additionally contain XXX motif or ZZZ motifs as wing modifications at the opposite end of the duplex region; and XXX and ZZZ each independently represents a 2′-O-methyl modification or 2′-fluoro modification.

[0482] In certain embodiments, the antisense RNAi oligonucleotide may contain Y′Y′Y′ motif occurring at positions 11, 12, 13 of the RNAi oligonucleotide, the count starting from the 1^{st} nucleotide from the 5′-end, or optionally, the count starting at the 1′ paired nucleotide within the duplex region, from the 5′-end; and Y′ represents 2′-O-methyl modification. The antisense RNAi oligonucleotide may additionally contain X′X′X′ motif or Z′Z′Z′ motif as wing modifications at the opposite end of the duplex region; and X′X′X′ or Z′Z′Z′ each independently represents a 2′-O-methyl modification or 2′-fluoro modification.

[0483] The sense RNAi oligonucleotide represented by any one of the above formulas Ia, Ib, Ic, and Id forms a duplex with an antisense RNAi oligonucleotide being represented by any one of the formulas IIa, IIb, IIc, and IId, respectively.

[0484] Accordingly, the RNAi agents described herein may comprise a sense RNAi oligonucleotide and an antisense RNAi oligonucleotide, each RNAi oligonucleotide having 14 to 30 nucleotides, the RNAi duplex represented by formula (III):

Sense:
5′ nₚ-Nₐ-(XXX)ᵢ-N_{b}-YYY-N_{b}-(ZZZ)ⱼ-Nₐ-n_{q} 3′
Antisense:
3′ nₚ′-Nₐ′-(X′X′X′)ₖ-N_{b}′-Y′Y′Y′-N_{b}′-(Z′Z′Z′)ₗ-Nₐ′-
n_{q}′ 5′

[0485] wherein:

[0486] i, j, k, and l are each independently 0 or 1;

[0487] p, p′, q, and q′ are each independently 0-6;

[0488] each Nₐ and Nₐ′ independently represents 0-25 linked nucleosides, each sequence comprising at least two differently modified nucleotides;

[0489] each N_{b} and N_{b}′ independently represents 0-10 linked nucleosides;

[0490] wherein each nₚ′, nₚ, n_{q}′ and n_{q}, each of which may or may not be present, independently represents an overhang nucleotide; and

[0491] XXX, YYY, X′X′X′, Y′Y′Y′, and Z′Z′Z′ each independently represent one motif of three identical modifications on three consecutive nucleotides.

[0492] In certain embodiments, i is 0 and j is 0; or i is 1 and j is 0; or i is 0 and j is 1; or both i and j are 0; or both i and j are 1. In another embodiment, k is 0 and 1 is 0; or k is 1 and 1 is 0, or k is 0 and 1 is 1; or both k and 1 are 0; or both k and l are 1.

[0493] Exemplary combinations of the sense RNAi oligonucleotide and antisense RNAi oligonucleotide forming a RNAi duplex include the formulas below:

5′nₚ-Nₐ—Y Y Y—Nₐ-n_{q} 3′

3′ np′-Nₐ′—Y′Y′Y′—Nₐ′n_{q}′ 5′ (IIIa)

5′nₚ-Nₐ—Y Y Y—N_{b}—Z Z Z—Nₐ-n_{q}3′

3′nₚ′—Nₐ′—Y′Y′Y′—Nb′—Z′Z′Z′—Nₐ′n_{q}'5′ (IIIb)

5′np-Nₐ—X X X—N_{b}—Y Y Y—Nₐ-n_{q} 3′

3′ np′-Nₐ′—X′X′X′—N_{b}′—Y′Y′Y′—Nₐ′-n_{q}′ 5′ (IIIc)

5′np-Nₐ—X X X—N_{b}—Y Y Y—N_{b}—Z Z Z—Nₐ-n_{q}3′

3′ np′-Nₐ′—X′X′X′—N_{b}′—Y′Y′Y′—N_{b}′—Z′Z′Z′—Nₐ-n_{q}'5′ (IIId)

[0494] When the RNAi agent is represented with formula IIIa, each Nₐ independently represents 2-20, 2-15, or 2-10 linked nucleosides.

[0495] When the RNAi agent is represented with formula IIIb, each N_{b} independently represents 1-10, 1-7, 1-5, or 1-4 linked nucleosides. Each Nₐ independently represents 2-20, 2-15, or 2-10 linked nucleosides.

[0496] When the RNAi agent is represented with formula IIIc, each N_{b}, N_{b}′ independently represents 0-10, 0-7, 0-10, 0-7, 0-5, 0-4, 0-2, or 0 linked nucleosides. Each Nₐ independently represents 2-20, 2-15, or 2-10 linked nucleosides.

[0497] When the RNAi agent is represented with formula IIId, each N_{b}, N_{b}′ independently represents 0-10, 0-7, 0-10, 0-7, 0-5, 0-4, 0-2, or 0 linked nucleosides. Each Nₐ, Nₐ′ independently 2-20, 2-15, or 2-10 linked nucleosides. Each Nₐ, Nₐ′, N_{b}, N_{b}′ independently comprises modifications of alternating pattern.

[0498] Each of X, Y, and Z in formulas III, IIIa, IIIb, IIIc, and IIId may be the same or different from each other.

[0499] When the RNAi agent is represented by formula III, IIIa, IIIb, IIIc, and/or IIId, at least one of the Y nucleotides may form a base pair with one of the Y′ nucleotides. Alternatively, at least two of the Y nucleotides may form base pairs with the corresponding Y′ nucleotides; or all three of the Y nucleotides may form base pairs with the corresponding Y′ nucleotides.

[0500] When the RNAi agent is represented by formula IIIb or IIId, at least one of the Z nucleotides may form a base pair with one of the Z′ nucleotides. Alternatively, at least two of the Z nucleotides may form base pairs with the corresponding Z′ nucleotides; or all three of the Z nucleotides may form base pairs with the corresponding Z′ nucleotides.

[0501] When the RNAi agent is represented by formula IIIc or IIId, at least one of the X nucleotides may form a base pair with one of the X′ nucleotides. Alternatively, at least two of the X nucleotides may form base pairs with the corresponding X′ nucleotides; or all three of the X nucleotides may form base pairs with the corresponding X′ nucleotides.

[0502] In certain embodiments, the modification of the Y nucleotide is different than the modification on the Y′ nucleotide, the modification on the Z nucleotide is different than the modification on the Z′ nucleotide, and/or the modification on the X nucleotide is different than the modification on the X′ nucleotide.

[0503] In certain embodiments, when the RNAi agent is represented by the formula IIId, the Nₐ modifications are 2′-O-methyl or 2′-fluoro modifications. In another embodiment, when the RNAi agent is represented by formula IIId, the Nₐ modifications are 2′-O-methyl or 2′-fluoro modifications and nₚ′>0 and at least one nₚ′ is linked to a neighboring nucleotide via phosphorothioate linkage. In other embodiments, when the RNAi agent is represented by formula IIId, the Nₐ modifications are 2′-O-methyl or 2′-fluoro modifications, nₚ′>0 and at least one nₚ′ is linked to a neighboring nucleotide via phosphorothioate linkage, and the sense RNAi oligonucleotide is conjugated to one or more cell targeting group attached through a bivalent or trivalent branched linker. In certain embodiments, when the RNAi agent is represented by formula IIId, the Nₐ modifications are 2′-O-methyl or 2′-fluoro modifications, nₚ′>0 and at least one nₚ′ is linked to a neighboring nucleotide via phosphorothioate linkage, the sense RNAi oligonucleotide comprises at least one phosphorothioate linkage and the sense RNAi oligonucleotide is conjugated to one or more cell targeting group attached through a bivalent or trivalent branched linker.

[0504] In certain embodiments, when the RNAi agent is represented by the formula IIIa, the Nₐ modifications are 2′-O-methyl or 2′-fluoro modifications and nₚ′>0 and at least one nₚ′ is linked to a neighboring nucleotide via phosphorothioate linkage, the sense RNAi oligonucleotide comprises at least one phosphorothioate linkage and the sense RNAi oligonucleotide is conjugated to one or more cell targeting group attached through a bivalent or trivalent branched linker.

[0505] In certain embodiments, the modification is a 2′-NMA modification.

[0506] In certain embodiments, the antisense strand may comprise a stabilized phosphate group attached to the 5′ position of the 5′-most nucleoside. In certain embodiments, the stabilized phosphate group comprises an (E)-vinyl phosphonate. In certain embodiments, the stabilized phosphate group comprises a cyclopropyl phosphonate.

[0507] In certain embodiments, the antisense strand may comprise a seed-pairing destabilizing modification. In certain embodiments, the seed-pairing destabilizing modification is located at position 6 (counting from the 5′ end). In certain embodiments, the seed-pairing destabilizing modification is located at position 7 (counting from the 5′ end). In certain embodiments, the seed-pairing destabilizing modification is a GNA sugar surrogate. In certain embodiments, the seed-pairing destabilizing modification is an (S)-GNA. In certain embodiments, the seed-pairing destabilizing modification is a UNA. In certain embodiments, the seed-pairing destabilizing modification is a morpholino.

[0508] In certain embodiments, the sense strand may comprise an inverted abasic sugar moiety attached to the 5′-most nucleoside. In certain embodiments, the sense strand may comprise an inverted abasic sugar moiety attached to the 3′-most nucleoside. In certain embodiments, the sense strand may comprise inverted abasic sugar moieties attached to both the 5′-most and 3′-most nucleosides.

[0509] In certain embodiments, the sense strand may comprise a conjugate attached at position 6 (counting from the 5′ end). In certain embodiments, the conjugate is attached at the 2′ position of the nucleoside. In certain embodiments the conjugate is a C₁₆ lipid conjugate. In certain embodiments, the modified nucleoside at position 6 of the sense strand has a 2′-O-hexadecyl modified sugar moiety.

[0510] III. Oligomeric Duplexes

[0511] In certain embodiments, oligomeric compounds described herein comprise an oligonucleotide, having a nucleobase sequence complementary to that of a target nucleic acid. In certain embodiments, an oligomeric compound is paired with a second oligomeric compound to form an oligomeric duplex. Such oligomeric duplexes comprise a first oligomeric compound having a region complementary to a target nucleic acid and a second oligomeric compound having a region complementary to the first oligomeric compound. In certain embodiments, the first oligomeric compound of an oligomeric duplex comprises or consists of (1) a modified or unmodified oligonucleotide and optionally a conjugate group and (2) a second modified or unmodified oligonucleotide and optionally a conjugate group. Either or both oligomeric compounds of an oligomeric duplex may comprise a conjugate group. The oligonucleotides of each oligomeric compound of an oligomeric duplex may include non-complementary overhanging nucleosides.

[0512] IV. Antisense Activity

[0513] In certain embodiments, oligomeric compounds and oligomeric duplexes are capable of hybridizing to a target nucleic acid, resulting in at least one antisense activity; such oligomeric compounds and oligomeric duplexes are antisense compounds. In certain embodiments, antisense compounds have antisense activity when they reduce or inhibit the amount or activity of a target nucleic acid by 25% or more in a standard cell assay. In certain embodiments, antisense compounds selectively affect one or more target nucleic acid. Such antisense compounds comprise a nucleobase sequence that hybridizes to one or more target nucleic acid, resulting in one or more desired antisense activity and does not hybridize to one or more non-target nucleic acid or does not hybridize to one or more non-target nucleic acid in such a way that results in significant undesired antisense activity.

[0514] In certain antisense activities, hybridization of an antisense compound to a target nucleic acid results in recruitment of a protein that cleaves the target nucleic acid. For example, certain antisense compounds result in RNase H mediated cleavage of the target nucleic acid. RNase H is a cellular endonuclease that cleaves the RNA strand of an RNA:DNA duplex. The DNA in such an RNA:DNA duplex need not be unmodified DNA. In certain embodiments, described herein are antisense compounds that are sufficiently “DNA-like” to elicit RNase H activity. In certain embodiments, one or more non-DNA-like nucleoside in the gap of a gapmer is tolerated.

[0515] In certain antisense activities, an antisense compound or a portion of an antisense compound is loaded into an RNA-induced silencing complex (RISC), ultimately resulting in cleavage of the target nucleic acid. For example, certain antisense compounds result in cleavage of the target nucleic acid by Argonaute. Antisense compounds that are loaded into RISC are RNAi compounds. RNAi compounds may be double-stranded (siRNA) or single-stranded (ssRNA).

[0516] In certain embodiments, hybridization of an antisense compound to a target nucleic acid does not result in recruitment of a protein that cleaves that target nucleic acid. In certain embodiments, hybridization of the antisense compound to the target nucleic acid results in alteration of splicing of the target nucleic acid. In certain embodiments, hybridization of an antisense compound to a target nucleic acid results in inhibition of a binding interaction between the target nucleic acid and a protein or other nucleic acid. In certain embodiments, hybridization of an antisense compound to a target nucleic acid results in alteration of translation of the target nucleic acid.

[0517] Antisense activities may be observed directly or indirectly. In certain embodiments, observation or detection of an antisense activity involves observation or detection of a change in an amount of a target nucleic acid or protein encoded by such target nucleic acid, a change in the ratio of splice variants of a nucleic acid or protein and/or a phenotypic change in a cell or subject.

[0518] V. Certain Target Nucleic Acids

[0519] In certain embodiments, oligomeric compounds comprise or consist of an oligonucleotide comprising a region that is complementary to a target nucleic acid. In certain embodiments, the target nucleic acid is an endogenous RNA molecule. In certain embodiments, the target nucleic acid encodes a protein. In certain such embodiments, the target nucleic acid is selected from: a mature mRNA and a pre-mRNA, including intronic, exonic and untranslated regions. In certain embodiments, the target RNA is a mature mRNA. In certain embodiments, the target nucleic acid is a pre-mRNA. In certain such embodiments, the target region is entirely within an intron. In certain embodiments, the target region spans an intron/exon junction. In certain embodiments, the target region is at least 50% within an intron. In certain embodiments, the target nucleic acid is the RNA transcriptional product of a retrogene. In certain embodiments, the target nucleic acid is a non-coding RNA. In certain such embodiments, the target non-coding RNA is selected from: a long non-coding RNA, a short non-coding RNA, an intronic RNA molecule.

[0520] A. Complementarity/Mismatches to the Target Nucleic Acid and Duplex Complementarity

### Gapmer Oligonucleotides

[0521] It is possible to introduce mismatch bases without eliminating activity. For example, Gautschi et al (J. Natl. Cancer Inst. 93:463-471, March 2001) demonstrated the ability of an oligonucleotide having 100% complementarity to the bcl-2 mRNA and having 3 mismatches to the bcl-xL mRNA to reduce the expression of both bcl-2 and bcl-xL in vitro and in vivo. Furthermore, this oligonucleotide demonstrated potent anti-tumor activity in vivo. Maher and Dolnick (Nuc. Acid. Res. 16:3341-3358, 1988) tested a series of tandem 14 nucleobase oligonucleotides, and a 28 and 42 nucleobase oligonucleotides comprised of the sequence of two or three of the tandem oligonucleotides, respectively, for their ability to arrest translation of human DHFR in a rabbit reticulocyte assay. Each of the three 14 nucleobase oligonucleotides alone was able to inhibit translation, albeit at a more modest level than the 28 or 42 nucleobase oligonucleotides.

[0522] In certain embodiments, oligonucleotides are complementary to the target nucleic acid over the entire length of the oligonucleotide. In certain embodiments, oligonucleotides are 99%, 95%, 90%, 85%, or 80% complementary to the target nucleic acid. In certain embodiments, oligonucleotides are at least 80% complementary to the target nucleic acid over the entire length of the oligonucleotide and comprise a region that is 100% or fully complementary to a target nucleic acid. In certain embodiments, the region of full complementarity is from 6 to 20, 10 to 18, or 18 to 20 nucleobases in length.

[0523] In certain embodiments, oligonucleotides comprise one or more mismatched nucleobases relative to the target nucleic acid. In certain embodiments, antisense activity against the target is reduced by such mismatch, but activity against a non-target is reduced by a greater amount. Thus, in certain embodiments selectivity of the oligonucleotide is improved. In certain embodiments, the mismatch is specifically positioned within an oligonucleotide having a gapmer motif. In certain embodiments, the mismatch is at position 1, 2, 3, 4, 5, 6, 7, or 8 from the 5′-end of the gap region. In certain embodiments, the mismatch is at position 9, 8, 7, 6, 5, 4, 3, 2, 1 from the 3′-end of the gap region. In certain embodiments, the mismatch is at position 1, 2, 3, or 4 from the 5′-end of the wing region. In certain embodiments, the mismatch is at position 4, 3, 2, or 1 from the 3′-end of the wing region.

### Antisense RNAi Oligonucleotides

[0524] In certain embodiments, antisense RNAi oligonucleotides comprise one or more mismatched nucleobases relative to the target nucleic acid. In certain embodiments, RNAi activity against the target is reduced by such mismatch, but activity against a non-target is reduced by a greater amount. Thus, in certain embodiments selectivity of the antisense RNAi oligonucleotides is improved.

[0525] In certain embodiments, antisense RNAi oligonucleotides comprise a targeting region complementary to the target nucleic acid. In certain embodiments, the targeting region comprises or consists of at least 8, at least 9, at least 10, at least 11, at least 12, at least 13, at least 14, at least 15, at least 16, at least 17, at least 18, at least 19, at least 20, at least 21, at least 22, at least 23, at least 25 or at least 25 contiguous nucleotides. In certain embodiments, the targeting region constitutes 70%, 80%, 85%, 90%, 95% of the nucleosides of the antisense RNAi oligonucleotide. In certain embodiments, the targeting region constitutes all of the nucleosides of the antisense RNAi oligonucleotide. In certain embodiments, the targeting region of the antisense RNAi oligonucleotide is at least 99%, 95%, 90%, 85%, or 80% complementary to the target nucleic acid. In certain embodiments, the targeting region of the antisense RNAi oligonucleotide is 100% complementary to the target nucleic acid.

### Sense RNAi Oligonucleotides

[0526] In certain embodiments, RNAi agents comprise a sense RNAi oligonucleotide. In such embodiments, sense RNAi oligonucleotides comprise an antisense hybridizing region complementary to the antisense RNAi oligonucleotide. In certain embodiments, the antisense hybridizing region comprises or consists of at least 8, at least 9, at least 10, at least 11, at least 12, at least 13, at least 14, at least 15, at least 16, at least 17, at least 18, at least 19, at least 20, at least 21, at least 22, at least 23, at least 25 or at least 25 contiguous nucleotides. In certain embodiments, the antisense hybridizing region constitutes 70%, 80%, 85%, 90%, 95% of the nucleosides of the sense RNAi oligonucleotide. In certain embodiments, the antisense hybridizing region constitutes all of the nucleosides of the sense RNAi oligonucleotide. In certain embodiments, the antisense hybridizing region of the sense RNAi oligonucleotide is at least 99%, 95%, 90%, 85%, or 80% complementary to the antisense RNAi oligonucleotide. In certain embodiments, the antisense hybridizing region of the sense RNAi oligonucleotide is 100% complementary to the antisense RNAi oligonucleotide.

[0527] The hybridizing region of a sense RNAi oligonucleotide hybridizes with the antisense RNAi oligonucleotide to form a duplex region. In certain embodiments, such duplex region consists of 7 hybridized pairs of nucleosides (one of each pair being on the antisense RNAi oligonucleotide and the other of each pair bien on the sense RNAi oligonucleotide). In certain embodiments, a duplex region comprises least 8, at least 9, at least 10, at least 11, at least 12, at least 13, at least 14, at least 15, at least 16, at least 17, at least 18, at least 19, at least 20, at least 21, at least 22, at least 23, at least 25 or at least 25 hybridized pairs. In certain embodiments, each nucleoside of antisense RNAi oligonucleotide is paired in the duplex region (i.e., the antisense RNAi oligonucleotide has no overhanging nucleosides). In certain embodiments, the antisense RNAi oligonucleotide includes unpaired nucleosides at the 3′-end and/or the 5′end (overhanging nucleosides). In certain embodiments, each nucleoside of sense RNAi oligonucleotide is paired in the duplex region (i.e., the sense RNAi oligonucleotide has no overhanging nucleosides). In certain embodiments, the sense RNAi oligonucleotide includes unpaired nucleosides at the 3′-end and/or the 5′end (overhanging nucleosides). In certain embodiments, duplexes formed by the antisense RNAi oligonucleotide and the sense RNAi oligonucleotide do not include any overhangs at one or both ends. Such ends without overhangs are referred to as blunt. In certain embodiments wherein the antisense RNAi oligonucleotide has overhanging nucleosides, one or more of those overhanging nucleosides are complementary to the target nucleic acid. In certain embodiments wherein the antisense RNAi oligonucleotide has overhanging nucleosides, one or more of those overhanging nucleosides are not complementary to the target nucleic acid.

[0528] B. SPDEF

[0529] In certain embodiments, oligomeric compounds comprise or consist of an oligonucleotide comprising a region that is complementary to a SPDEF nucleic acid. In certain embodiments, the SPDEF nucleic acid has the sequence set forth in SEQ ID NO: 1 (GENBANK Accession No. NM_012391.2). In certain embodiments, the SPDEF nucleic acid has the sequence set forth in SEQ ID NO: 2 (the complement of GENBANK Accession No. NC_000006.12 truncated from nucleotides 34536001 to 34558000). In certain embodiments, the SPDEF nucleic acid has the sequence set forth in SEQ ID NO: 3 (GENBANK Accession No. NM_001252294.1). In certain embodiments, the SPDEF nucleic acid has the sequence set forth in SEQ ID NO: 4 (GENBANK Accession No. XM_005248988.3). In certain embodiments, the SPDEF nucleic acid has the sequence set forth in SEQ ID NO: 5 (GENBANK Accession No. XM_006715048.1).

[0530] In certain embodiments an oligomeric compound complementary to any one of SEQ ID NOS: 1-5 is capable of reducing an SPDEF RNA in a cell. In certain embodiments an oligomeric compound complementary to any one of SEQ ID NOS: 1-5 is capable of reducing an SPDEF protein in a cell. In certain embodiments, the cell is in vitro. In certain embodiments, the cell is in a subject. In certain embodiments, the oligomeric compound consists of a modified oligonucleotide.

[0531] In certain embodiments, an oligomeric compound complementary to any one of SEQ ID NOS: 1-5 is capable of ameliorating one or more symptoms or hallmarks of a pulmonary condition when it is introduced to a cell in a subject. In certain embodiments, the one or more symptoms or hallmarks are selected from shortness of breath, chest pain, coughing, wheezing, fatigue, sleep disruption, bronchospasm, and combinations thereof. In certain embodiments, the pulmonary condition is selected from bronchitis, asthma, COPD, pneumonia, emphysema, rhinitis, sinusitis, nasal polyposis, sinus polyposis, bronchiectasis, and sarcoidosis. In certain embodiments, the pulmonary condition is chronic bronchitis. Chronic bronchitis may be characterized by a cough productive of sputum for over three months' duration for two consecutive years. In certain embodiments, the pulmonary condition is a result of an allergic reaction. In certain embodiments, the pulmonary condition is a result of a viral infection. For example, the pulmonary condition may be a common cold, croup, bronchitis or pneumonia caused by an adenovirus infection. In certain embodiments, the pulmonary condition is severe asthma. In certain embodiments, the pulmonary condition is Type 2 asthma, also referred to as Th2 asthma.

[0532] In certain embodiments, an oligomeric compound complementary to any one of SEQ ID NOS: 1-5 is capable of ameliorating one or more symptoms or hallmarks of a gastrointestinal condition when it is introduced to a cell in a subject. In certain embodiments, the gastrointestinal condition is characterized by mucus in the stool of the subject. In certain embodiments, the gastrointestinal condition is ulcerative colitis.

[0533] In certain embodiments, an oligomeric compound complementary to any one of SEQ ID NOS: 1-5 is capable of reducing a detectable amount of an SPDEF RNA in the lung of a subject when the oligomeric compound is administered to the subject. In some instances, the oligomeric compound is administered via an inhaler or nebulizer. The detectable amount of the SPDEF RNA may be reduced by at least 10%, at least 20%, at least 30%, at least 40%, at least 50%, at least 60%, at least 70%, at least 80%, or at least 90%. In certain embodiments, an oligomeric compound complementary to any one of SEQ ID NOS: 1-5 is capable of reducing a detectable amount of an SPDEF protein in the lung of the subject when the oligomeric compound is administered to the subject. The detectable amount of the SPDEF protein may be reduced by at least 10%, at least 20%, at least 30%, at least 40%, at least 50%, at least 60%, at least 70%, at least 80%, or at least 90%.

[0534] VI. Certain Compounds

[0535] 1. Compound No. 833561

[0536] In certain embodiments, the oligomeric compound is Compound No. 833561. In certain embodiments, Compound No. 833561 is characterized as an oligomeric compound consisting of a modified oligonucleotide, wherein the modified oligonucleotide is a 3-10-3 cEt gapmer, having a sequence of (from 5′ to 3′) CAATAAGCAAGTCTGG (SEQ ID NO: 1129), wherein each of nucleosides 1-3 and 14-16 (from 5′ to 3′) comprise a cEt modification and each of nucleosides 4-13 are 2′-deoxynucleosides, wherein the internucleoside linkages between all nucleosides are phosphorothioate linkages, and wherein each cytosine is a 5-methyl cytosine.

[0537] In certain embodiments, Compound 833561 is characterized by the following chemical notation: mCks Aks Aks Tds Ads Ads Gds mCds Ads Ads Gds Tds mCds Tks Gks Gk; wherein

[0538] A=an adenine nucleobase

[0539] mC=a 5-methyl cytosine nucleobase

[0540] G=a guanine nucleobase

[0541] T=a thymine nucleobase

[0542] k=a cEt modified sugar

[0543] d=a 2′-deoxyribose sugar, and

[0544] s=a phosphorothioate internucleoside linkage.

[0545] In certain embodiments, Compound No. 833561 is represented by the following chemical structure:

[chemical structure]

[0546] In certain embodiments, Compound No. 833561 is in the form of an anion or a salt thereof. For example, the oligomeric compound may be in the form of a sodium salt. In certain embodiments, the oligomeric compound is in anionic form in a solution.

[0547] In certain embodiments, Compound No. 833561 is represented by the following chemical structure:

[chemical structure]

[0548] In certain embodiments, Compound No. 833561 is represented by the following chemical structure:

[chemical structure]

### Compound No. 936142

[0549] In certain embodiments, the oligomeric compound is Compound No. 936142. In certain embodiments, Compound No. 936142 is characterized as an oligomeric compound consisting of a modified oligonucleotide, wherein the modified oligonucleotide is a 2-9-5 mixed-wing cEt/MOE gapmer, having a sequence of ACTTGTAACAGTGGTT (from 5′ to 3′) (SEQ ID NO: 1983), wherein each of nucleosides 1-2 and 15-16 (from 5′ to 3′) comprise a cEt modification, each of nucleosides 12-14 is a 2′-MOE nucleoside, and each of nucleosides 3-11 is a 2′-deoxynucleoside, wherein the internucleoside linkages between all nucleosides are phosphorothioate linkages, and wherein each cytosine is a 5-methyl cytosine.

[0550] In certain embodiments, Compound No. 936142 is characterized by the following chemical notation: Aks mCks Tds Tds Gds Tds Ads Ads mCds Ads Gds Tes Ges Ges Tks Tk; wherein

[0551] A=an adenine nucleobase

[0552] mC=a 5-methyl cytosine nucleobase

[0553] G=a guanine nucleobase

[0554] T=a thymine nucleobase

[0555] k=a cEt modified sugar

[0556] d=a 2′-deoxyribose sugar, and

[0557] s=a phosphorothioate internucleoside linkage.

[0558] In certain embodiments, Compound No. 936142 is represented by the following chemical structure:

[chemical structure]

[0559] In certain embodiments, Compound No. 936142 is in the form of an anion or a salt thereof. For example, the oligomeric compound may be in the form of a sodium salt. In certain embodiments, the oligomeric compound is in anionic form in a solution.

[0560] In certain embodiments, Compound No. 936142 is characterized by the following chemical structure:

[chemical structure]

[0561] VII. Certain Pharmaceutical Compositions & Delivery Systems

[0562] In certain embodiments, described herein are pharmaceutical compositions comprising one or more oligomeric compounds. In certain embodiments, the one or more oligomeric compounds each consists of a modified oligonucleotide. In certain embodiments, the pharmaceutical composition comprises a pharmaceutically acceptable diluent or carrier. In certain embodiments, a pharmaceutical composition comprises or consists of a sterile saline solution and one or more oligomeric compound. In certain embodiments, the sterile saline is pharmaceutical grade saline. In certain embodiments, a pharmaceutical composition comprises or consists of one or more oligomeric compound and sterile water. In certain embodiments, the sterile water is pharmaceutical grade water. In certain embodiments, a pharmaceutical composition comprises or consists of one or more oligomeric compound and phosphate-buffered saline (PBS). In certain embodiments, the sterile PBS is pharmaceutical grade PBS. In certain embodiments, a pharmaceutical composition comprises or consists of one or more oligomeric compound and artificial cerebrospinal fluid. In certain embodiments, the artificial cerebrospinal fluid is pharmaceutical grade.

[0563] In certain embodiments, pharmaceutical compositions comprise one or more oligomeric compound and one or more excipients. In certain embodiments, excipients are selected from water, salt solutions, alcohol, polyethylene glycols, gelatin, lactose, amylase, magnesium stearate, talc, silicic acid, viscous paraffin, hydroxymethylcellulose and polyvinylpyrrolidone.

[0564] In certain embodiments, oligomeric compounds may be admixed with pharmaceutically acceptable active and/or inert substances for the preparation of pharmaceutical compositions or formulations. Compositions and methods for the formulation of pharmaceutical compositions depend on a number of criteria, including, but not limited to, route of administration, extent of disease, or dose to be administered.

[0565] In certain embodiments, pharmaceutical compositions comprising an oligomeric compound encompass any pharmaceutically acceptable salts of the oligomeric compound, esters of the oligomeric compound, or salts of such esters. In certain embodiments, pharmaceutical compositions comprising oligomeric compounds comprising one or more oligonucleotide, upon administration to a subject, including a human, are capable of providing (directly or indirectly) the biologically active metabolite or residue thereof. Accordingly, for example, the disclosure is also drawn to pharmaceutically acceptable salts of oligomeric compounds, prodrugs, pharmaceutically acceptable salts of such prodrugs, and other bioequivalents. Suitable pharmaceutically acceptable salts include, but are not limited to, sodium and potassium salts. In certain embodiments, prodrugs comprise one or more conjugate group attached to an oligonucleotide, wherein the conjugate group is cleaved by endogenous nucleases within the body.

[0566] Lipid moieties have been used in nucleic acid therapies in a variety of methods. In certain such methods, the nucleic acid, such as an oligomeric compound, is introduced into preformed liposomes or lipoplexes made of mixtures of cationic lipids and neutral lipids. In certain methods, DNA complexes with mono- or poly-cationic lipids are formed without the presence of a neutral lipid. In certain embodiments, a lipid moiety is selected to increase distribution of a pharmaceutical agent to a particular cell or tissue. In certain embodiments, a lipid moiety is selected to increase distribution of a pharmaceutical agent to fat tissue. In certain embodiments, a lipid moiety is selected to increase distribution of a pharmaceutical agent to muscle tissue.

[0567] In certain embodiments, pharmaceutical compositions comprise a delivery system. Examples of delivery systems include, but are not limited to, liposomes and emulsions. Certain delivery systems are useful for preparing certain pharmaceutical compositions including those comprising hydrophobic compounds. In certain embodiments, certain organic solvents such as dimethylsulfoxide are used.

[0568] In certain embodiments, pharmaceutical compositions comprise one or more tissue-specific delivery molecules designed to deliver the one or more pharmaceutical agents of the present invention to specific tissues or cell types. For example, in certain embodiments, pharmaceutical compositions include liposomes coated with a tissue-specific antibody.

[0569] In certain embodiments, pharmaceutical compositions comprise a co-solvent system. Certain of such co-solvent systems comprise, for example, benzyl alcohol, a nonpolar surfactant, a water-miscible organic polymer, and an aqueous phase. In certain embodiments, such co-solvent systems are used for hydrophobic compounds. A non-limiting example of such a co-solvent system is the VPD co-solvent system, which is a solution of absolute ethanol comprising 3% w/v benzyl alcohol, 8% w/v of the nonpolar surfactant Polysorbate 80™ and 65% w/v polyethylene glycol 300. The proportions of such co-solvent systems may be varied considerably without significantly altering their solubility and toxicity characteristics. Furthermore, the identity of co-solvent components may be varied: for example, other surfactants may be used instead of Polysorbate 80™; the fraction size of polyethylene glycol may be varied; other biocompatible polymers may replace polyethylene glycol, e.g., polyvinyl pyrrolidone; and other sugars or polysaccharides may substitute for dextrose.

[0570] In certain embodiments, pharmaceutical compositions are prepared for oral administration. In certain embodiments, pharmaceutical compositions are prepared for buccal administration. In certain embodiments, a pharmaceutical composition is prepared for administration by injection (e.g., intravenous, subcutaneous, intramuscular, intrathecal (IT), intracerebroventricular (ICV), etc.). In certain of such embodiments, a pharmaceutical composition comprises a carrier and is formulated in aqueous solution, such as water or physiologically compatible buffers such as Hanks's solution, Ringer's solution, or physiological saline buffer. In certain embodiments, other ingredients are included (e.g., ingredients that aid in solubility or serve as preservatives). In certain embodiments, injectable suspensions are prepared using appropriate liquid carriers, suspending agents and the like. Certain pharmaceutical compositions for injection are presented in unit dosage form, e.g., in ampoules or in multi-dose containers. Certain pharmaceutical compositions for injection are suspensions, solutions or emulsions in oily or aqueous vehicles, and may contain formulatory agents such as suspending, stabilizing and/or dispersing agents. Certain solvents suitable for use in pharmaceutical compositions for injection include, but are not limited to, lipophilic solvents and fatty oils, such as sesame oil, synthetic fatty acid esters, such as ethyl oleate or triglycerides, and liposomes.

[0571] Certain embodiments provide pharmaceutical compositions suitable for aerosolization and/or dispersal by a nebulizer or inhaler. In certain embodiments, the pharmaceutical composition is a solid comprising particles of compounds that are of respirable size. A solid particulate composition can optionally contain a dispersant which serves to facilitate the formation of an aerosol, e.g., lactose. Solid pharmaceutical compositions comprising an oligonucleotide can also be aerosolized using any solid particulate medicament aerosol generator known in the art, e.g., a dry powder inhaler. In certain embodiments, the powder employed in the inhaler consists of the compound comprising the active compound or of a powder blend comprising the active compound, a suitable powder diluent, and an optional surfactant. In certain embodiments, the pharmaceutical composition is a liquid. In certain such embodiments, the liquid is administered as an aerosol that is produced by any suitable means, such as with a nebulizer or inhaler. See, e.g., U.S. Pat. No. 4,501,729. In certain embodiments, the nebulizer is a device for producing a spray of liquid. Nebulizers are devices that transform solutions or suspensions into an aerosol mist and are well known in the art. Suitable nebulizers include jet nebulizers, ultrasonic nebulizers, electronic mesh nebulizers, and vibrating mesh nebulizers. In certain embodiments, the nebulizer is activated manually by squeezing a flexible bottle that contains the pharmaceutical composition. In certain embodiments, the aerosol is produced by a metered dose inhaler, which typically contains a suspension or solution formulation of the active compound in a liquefied propellant. Pharmaceutical compositions suitable for aerosolization can comprise propellants, surfactants, co-solvents, dispersants, preservatives, and/or other additives or excipients.

[0572] A compound described herein complementary to an SPDEF nucleic acid can be utilized in pharmaceutical compositions by combining the compound with a suitable pharmaceutically acceptable diluent or carrier and/or additional components such that the pharmaceutical composition is suitable for aerosolization by a nebulizer or inhaler. In certain embodiments, a pharmaceutically acceptable diluent is phosphate buffered saline. Accordingly, in one embodiment, employed in the methods described herein is a pharmaceutical composition comprising a compound complementary to an SPDEF nucleic acid and a pharmaceutically acceptable diluent. In certain embodiments, the pharmaceutically acceptable diluent is phosphate buffered saline. In certain embodiments, the compound comprises or consists of a modified oligonucleotide provided herein.

[0573] Pharmaceutical compositions comprising compounds provided herein encompass any pharmaceutically acceptable salts, esters, or salts of such esters, or any other oligonucleotide which, upon administration to an animal, including a human, is capable of providing (directly or indirectly) the biologically active metabolite or residue thereof. In certain embodiments, the compounds are antisense compounds or oligomeric compounds. In certain embodiments, the compound comprises or consists of a modified oligonucleotide. Accordingly, for example, the disclosure is also drawn to pharmaceutically acceptable salts of compounds, prodrugs, pharmaceutically acceptable salts of such prodrugs, and other bioequivalents. Suitable pharmaceutically acceptable salts include, but are not limited to, sodium and potassium salts. A prodrug can include the incorporation of additional nucleosides at one or both ends of a compound which are cleaved by endogenous nucleases within the body, to form the active compound.

[0574] Under certain conditions, certain compounds disclosed herein are shown in the form of a free acid. Although such compounds may be drawn or described in protonated (free acid) form, aqueous solutions of such compounds may exist in equilibrium among an ionized (anion) form, and in association with a cation (salt form). For example, a phosphate linkage of an oligonucleotide in aqueous solution exists in equilibrium among free acid, anion, and salt forms. Unless otherwise indicated, compounds described herein are intended to include all such forms. Moreover, oligonucleotides have several such linkages, each of which is in equilibrium. Thus, oligonucleotides in solution exist in an ensemble of forms at multiple positions, all at equilibrium. The term “oligonucleotide” is intended to include all such forms. Drawn structures necessarily depict a single form. Nevertheless, unless otherwise indicated, such drawings are likewise intended to include corresponding forms. Herein, a structure depicting the free acid of a compound followed by the term or salts thereof expressly includes all such forms that may be fully or partially protonated/de-protonated/in association with a cation. In certain instances, one or more specific cation is identified.

[0575] In certain embodiments, oligomeric compounds disclosed herein are in a form of a sodium salt. In certain embodiments, oligomeric compounds disclosed herein are in a form of a potassium salt. In certain embodiments, oligomeric compounds disclosed herein are in aqueous solution with sodium. In certain embodiments, oligomeric compounds are in aqueous solution with potassium. In certain embodiments, oligomeric compounds are in PBS. In certain embodiments, oligomeric compounds are in water. In certain such embodiments, the pH of the solution is adjusted with NaOH and/or HCl to achieve a desired pH.

[0576] VIII. Certain Hotspot Regions

[0577] 1. Nucleobases 3521-3554 of SEQ ID NO: 2

[0578] In certain embodiments, nucleobases 3521-3554 of SEQ ID NO: 2 comprise a hotspot region. In certain embodiments, modified oligonucleotides are complementary to a portion of nucleobases 3521-3554 of SEQ ID NO: 2. In certain embodiments, the modified oligonucleotides are 16 to 20 nucleobases in length. In certain embodiments, the modified oligonucleotides are gapmers. In certain embodiments, the modified oligonucleotides comprise a 2′-MOE nucleoside, a 2′-OMe nucleoside, a cEt nucleoside, or a combination thereof. In certain embodiments, the internucleoside linkages of the modified nucleotides are phosphorothioate internucleoside linkages or phosphodiester linkages, or a combination thereof.

[0579] The nucleobase sequences of SEQ ID NOs: 1053, 1129, 2166, 2167, 2168, 2169, 2170, 2171, 2172, 2173, 2174, 2175, 2176, 2242, and 2247 are complementary to nucleobases 3521-3554 of SEQ ID NO: 2.

[0580] The nucleobase sequences of Compound Nos: 833560, 833561, 936068, 936108, 936146, 936178, 936218, 936256, 936288, 936290, 936291, 936292, 936293, 936294, 936297, 936298, 936299, 936300, and 936301 are complementary to nucleobases 3521-3554 of SEQ ID NO: 2.

[0581] In certain embodiments, modified oligonucleotides complementary to a portion of nucleobases 3521-3554 of SEQ ID NO: 2 achieve at least 27% reduction of SPDEF RNA in a standard cell assay. In certain embodiments, modified oligonucleotides complementary to a portion of nucleobases 3521-3554 of SEQ ID NO: 2 achieve an average of 55% reduction of SPDEF RNA in a standard cell assay.

[0582] 2. Nucleobases 3684-3702 of SEQ ID NO: 2

[0583] In certain embodiments, nucleobases 3684-3702 of SEQ ID NO: 2 comprise a hotspot region. In certain embodiments, modified oligonucleotides are complementary to a portion of nucleobases 3684-3702 of SEQ ID NO: 2. In certain embodiments, the modified oligonucleotides are 16 to 20 nucleobases in length. In certain embodiments, the modified oligonucleotides are gapmers. In certain embodiments, the modified oligonucleotides comprise a 2′-MOE nucleoside, a 2′-OMe nucleoside, a cEt nucleoside, or a combination thereof. In certain embodiments, the internucleoside linkages of the modified nucleotides are phosphorothioate internucleoside linkages or phosphodiester linkages, or a combination thereof.

[0584] The nucleobase sequences of SEQ ID NOs: 1777, 1852, 1928, and 2004 are complementary to nucleobases 3684-3702 of SEQ ID NO: 2.

[0585] The nucleobase sequences of Compound NOs: 854213, 854214, 854215, 854216, 936069, 936109, 936147, 936179, 936219, and 936257 are complementary to nucleobases 3684-3702 of SEQ ID NO: 2.

[0586] In certain embodiments, modified oligonucleotides complementary to a portion of nucleobases 3684-3702 of SEQ ID NO: 2 achieve at least 45% reduction of SPDEF RNA in a standard cell assay. In certain embodiments, modified oligonucleotides complementary to a portion of nucleobases 3684-3702 of SEQ ID NO: 2 achieve an average of 57% reduction of SPDEF RNA in a standard cell assay.

[0587] 3. Nucleobases 3785-3821 of SEQ ID NO: 2

[0588] In certain embodiments, nucleobases 3785-3821 of SEQ ID NO: 2 comprise a hotspot region. In certain embodiments, modified oligonucleotides are complementary to a portion of nucleobases 3785-3821 of SEQ ID NO: 2. In certain embodiments, the modified oligonucleotides are 16 to 20 nucleobases in length. In certain embodiments, the modified oligonucleotides are gapmers. In certain embodiments, the modified oligonucleotides comprise a 2′-MOE nucleoside, a 2′-OMe nucleoside, a cEt nucleoside, or a combination thereof. In certain embodiments, the internucleoside linkages of the modified nucleotides are phosphorothioate internucleoside linkages or phosphodiester linkages, or a combination thereof.

[0589] The nucleobase sequences of SEQ ID NOs: 1282, 1358, 1434, 2177, 2178, 2179, 2180, 2181, 2182, 2183, 2184, 2185, and 2186 are complementary to nucleobases 3785-3821 of SEQ ID NO: 2.

[0590] The nucleobase sequences of Compound Nos: 833579, 833580, 833581, 936070, 936110, 936148, 936180, 936220, 936258, 936310, 936311, 936312, 936313, 936314, 936315, 936316, 936317, 936318, and 936325 are complementary to nucleobases 3785-3821 of SEQ ID NO: 2.

[0591] In certain embodiments, modified oligonucleotides complementary to a portion of nucleobases 3785-3821 of SEQ ID NO: 2 achieve at least 37% reduction of SPDEF RNA in a standard cell assay. In certain embodiments, modified oligonucleotides complementary to a portion of nucleobases 3785-3821 of SEQ ID NO: 2 achieve an average of 60% reduction of SPDEF RNA in a standard cell assay.

[0592] 4. Nucleobases 6356-6377 of SEQ ID NO: 2

[0593] In certain embodiments, nucleobases 6356-6377 of SEQ ID NO: 2 comprise a hotspot region. In certain embodiments, modified oligonucleotides are complementary to a portion of nucleobases 6356-6377 of SEQ ID NO: 2. In certain embodiments, the modified oligonucleotides are 16 to 20 nucleobases in length. In certain embodiments, the modified oligonucleotides are gapmers. In certain embodiments, the modified oligonucleotides comprise a 2′-MOE nucleoside, a 2′-OMe nucleoside, a cEt nucleoside, or a combination thereof. In certain embodiments, the internucleoside linkages of the modified nucleotides are phosphorothioate internucleoside linkages or phosphodiester linkages, or a combination thereof.

[0594] The nucleobase sequences of SEQ ID NOs: 678, 2198, 2199, 2200, 2244, and 2248 are complementary to nucleobases 6356-6377 of SEQ ID NO: 2.

[0595] The nucleobase sequences of Compound Nos: 833635, 936079, 936119, 936154, 936189, 936229, 936264, 936347, 936348, and 936349 are complementary to nucleobases 6356-6377 of SEQ ID NO: 2.

[0596] In certain embodiments, modified oligonucleotides complementary to a portion of nucleobases 6356-6377 of SEQ ID NO: 2 achieve at least 38% reduction of SPDEF RNA in a standard cell assay. In certain embodiments, modified oligonucleotides complementary to a portion of nucleobases 6356-6377 of SEQ ID NO: 2 achieve an average of 53% reduction of SPDEF RNA in a standard cell assay.

[0597] 5. Nucleobases 8809-8826 of SEQ ID NO: 2

[0598] In certain embodiments, nucleobases 8809-8826 of SEQ ID NO: 2 comprise a hotspot region. In certain embodiments, modified oligonucleotides are complementary to a portion of nucleobases 8809-8826 of SEQ ID NO: 2. In certain embodiments, the modified oligonucleotides are 16 to 20 nucleobases in length. In certain embodiments, the modified oligonucleotides are gapmers. In certain embodiments, the modified oligonucleotides comprise a 2′-MOE nucleoside, a 2′-OMe nucleoside, a cEt nucleoside, or a combination thereof. In certain embodiments, the internucleoside linkages of the modified nucleotides are phosphorothioate internucleoside linkages or phosphodiester linkages, or a combination thereof.

[0599] The nucleobase sequences of SEQ ID NOs: 683, 1715, and 2245 are complementary to nucleobases 8809-8826 of SEQ ID NO: 2.

[0600] The nucleobase sequences of Compound Nos: 833715, 854302, 936081, 936082, 936121, 936191, 936192, and 936231 are complementary to nucleobases 8809-8826 of SEQ ID NO: 2.

[0601] In certain embodiments, modified oligonucleotides complementary to a portion of nucleobases 8809-8826 of SEQ ID NO: 2 achieve at least 52% reduction of SPDEF RNA in a standard cell assay. In certain embodiments, modified oligonucleotides complementary to a portion of nucleobases 8809-8826 of SEQ ID NO: 2 achieve an average of 66% reduction of SPDEF RNA in a standard cell assay.

[0602] 6. Nucleobases 9800-9817 of SEQ ID NO: 2

[0603] In certain embodiments, nucleobases 9800-9817 of SEQ ID NO: 2 comprise a hotspot region. In certain embodiments, modified oligonucleotides are complementary to a portion of nucleobases 9800-9817 of SEQ ID NO: 2. In certain embodiments, the modified oligonucleotides are 16 to 20 nucleobases in length. In certain embodiments, the modified oligonucleotides are gapmers. In certain embodiments, the modified oligonucleotides comprise a 2′-MOE nucleoside, a 2′-OMe nucleoside, a cEt nucleoside, or a combination thereof. In certain embodiments, the internucleoside linkages of the modified nucleotides are phosphorothioate internucleoside linkages or phosphodiester linkages, or a combination thereof.

[0604] The nucleobase sequences of SEQ ID NOs: 761, 2229, and 2230 are complementary to nucleobases 9800-9817 of SEQ ID NO: 2.

[0605] The nucleobase sequences of Compound Nos: 833748, 936084, 936123, 936158, 936194, 936233, 936268, 936409, and 936410 are complementary to nucleobases 9800-9817 of SEQ ID NO: 2.

[0606] In certain embodiments, modified oligonucleotides complementary to a portion of nucleobases 9800-9817 of SEQ ID NO: 2 achieve at least 51% reduction of SPDEF RNA in a standard cell assay. In certain embodiments, modified oligonucleotides complementary to a portion of nucleobases 9800-9817 of SEQ ID NO: 2 achieve an average of 58% reduction of SPDEF RNA in a standard cell assay.

[0607] 7. Nucleobases 14212-14231 of SEQ ID NO: 2

[0608] In certain embodiments, nucleobases 14212-14231 of SEQ ID NO: 2 comprise a hotspot region. In certain embodiments, modified oligonucleotides are complementary to a portion of nucleobases 14212-14231 of SEQ ID NO: 2. In certain embodiments, the modified oligonucleotides are 16 to 20 nucleobases in length. In certain embodiments, the modified oligonucleotides are gapmers. In certain embodiments, the modified oligonucleotides comprise a 2′-MOE nucleoside, a 2′-OMe nucleoside, a cEt nucleoside, or a combination thereof. In certain embodiments, the internucleoside linkages of the modified nucleotides are phosphorothioate internucleoside linkages or phosphodiester linkages, or a combination thereof.

[0609] The nucleobase sequences of SEQ ID NOs: 1606, 1682, 2255, 2275, and 2280 are complementary to nucleobases 14212-14231 of SEQ ID NO: 2.

[0610] The nucleobase sequences of Compound Nos: 833886, 833887, 936096, 936097, 936135, 936136, 936169, 936206, 936207, 936245, 936246, 936279, and 936442 are complementary to nucleobases 14212-14231 of SEQ ID NO: 2.

[0611] In certain embodiments, modified oligonucleotides complementary to a portion of nucleobases 14212-14231 of SEQ ID NO: 2 achieve at least 45% reduction of SPDEF RNA in a standard cell assay. In certain embodiments, modified oligonucleotides complementary to a portion of nucleobases 14212-14231 of SEQ ID NO: 2 achieve an average of 59% reduction of SPDEF RNA in a standard cell assay.

[0612] 8. Nucleobases 15385-15408 of SEQ ID NO: 2

[0613] In certain embodiments, nucleobases 15385-15408 of SEQ ID NO: 2 comprise a hotspot region. In certain embodiments, modified oligonucleotides are complementary to a portion of nucleobases 15385-15408 of SEQ ID NO: 2. In certain embodiments, the modified oligonucleotides are 16 to 20 nucleobases in length. In certain embodiments, the modified oligonucleotides are gapmers. In certain embodiments, the modified oligonucleotides comprise a 2′-MOE nucleoside, a 2′-OMe nucleoside, a cEt nucleoside, or a combination thereof. In certain embodiments, the internucleoside linkages of the modified nucleotides are phosphorothioate internucleoside linkages or phosphodiester linkages, or a combination thereof.

[0614] The nucleobase sequences of SEQ ID NOs: 999, 1075, 2262, 2263, 2264, 2265, 2266, 2267, and 2268 are complementary to nucleobases 15385-15408 of SEQ ID NO: 2.

[0615] The nucleobase sequences of Compound Nos: 833910, 833911, 936098, 936137, 936170, 936208, 936247, 936280, 936452, 936453, 936454, 936455, 936456, 936457, and 936458 are complementary to nucleobases 15385-15408 of SEQ ID NO: 2.

[0616] In certain embodiments, modified oligonucleotides complementary to a portion of nucleobases 15385-15408 of SEQ ID NO: 2 achieve at least 44% reduction of SPDEF RNA in a standard cell assay. In certain embodiments, modified oligonucleotides complementary to a portion of nucleobases 15385-15408 of SEQ ID NO: 2 achieve an average of 59% reduction of SPDEF RNA in a standard cell assay.

[0617] 9. Nucleobases 17289-17307 of SEQ ID NO: 2

[0618] In certain embodiments, nucleobases 17289-17307 of SEQ ID NO: 2 comprise a hotspot region. In certain embodiments, modified oligonucleotides are complementary to a portion of nucleobases 17289-17307 of SEQ ID NO: 2. In certain embodiments, the modified oligonucleotides are 16 to 20 nucleobases in length. In certain embodiments, the modified oligonucleotides are gapmers. In certain embodiments, the modified oligonucleotides comprise a 2′-MOE nucleoside, a 2′-OMe nucleoside, a cEt nucleoside, or a combination thereof. In certain embodiments, the internucleoside linkages of the modified nucleotides are phosphorothioate internucleoside linkages or phosphodiester linkages, or a combination thereof.

[0619] The nucleobase sequences of SEQ ID NOs: 163, 1980, 2056, and 2277 are complementary to nucleobases 17289-17307 of SEQ ID NO: 2.

[0620] The nucleobase sequences of Compound Nos: 802094, 854526, 854527, 936100, 936101, 936139, 936210, 936211, and 936249 are complementary to nucleobases 17289-17307 of SEQ ID NO: 2.

[0621] In certain embodiments, modified oligonucleotides complementary to a portion of nucleobases 17289-17307 of SEQ ID NO: 2 achieve at least 43% reduction of SPDEF RNA in a standard cell assay. In certain embodiments, modified oligonucleotides complementary to a portion of nucleobases 17289-17307 of SEQ ID NO: 2 achieve an average of 60% reduction of SPDEF RNA in a standard cell assay.

[0622] 10. Nucleobases 17490-17509 of SEQ ID NO: 2

[0623] In certain embodiments, nucleobases 17490-17509 of SEQ ID NO: 2 comprise a hotspot region. In certain embodiments, modified oligonucleotides are complementary to a portion of nucleobases 17490-17509 of SEQ ID NO: 2. In certain embodiments, the modified oligonucleotides are 16 to 20 nucleobases in length. In certain embodiments, the modified oligonucleotides are gapmers. In certain embodiments, the modified oligonucleotides comprise a 2′-MOE nucleoside, a 2′-OMe nucleoside, a cEt nucleoside, or a combination thereof. In certain embodiments, the internucleoside linkages of the modified nucleotides are phosphorothioate internucleoside linkages or phosphodiester linkages, or a combination thereof.

[0624] The nucleobase sequences of SEQ ID NOs: 1831, 1907, 1983, 2059, and 2282 are complementary to nucleobases 17490-17509 of SEQ ID NO: 2.

[0625] The nucleobase sequences of Compound Nos: 854542, 854543, 854544, 854545, 936104, 936142, 936174, 936214, 936252, and 936284 are complementary to nucleobases 17490-17509 of SEQ ID NO: 2.

[0626] In certain embodiments, modified oligonucleotides complementary to a portion of nucleobases 17490-17509 of SEQ ID NO: 2 achieve at least 39% reduction of SPDEF RNA in a standard cell assay. In certain embodiments, modified oligonucleotides complementary to a portion of nucleobases 17490-17509 of SEQ ID NO: 2 achieve an average of 63% reduction of SPDEF RNA in a standard cell assay.

[0627] 11. Nucleobases 19600-19642 of SEQ ID NO: 2

[0628] In certain embodiments, nucleobases 19600-19642 of SEQ ID NO: 2 comprise a hotspot region. In certain embodiments, oligomeric compounds or oligomeric duplexes comprise modified oligonucleotides that are complementary within nucleobases 19600-19642 of SEQ ID NO: 2. In certain embodiments, modified oligonucleotides are 23 nucleobases in length. In certain embodiments, modified oligonucleotides are antisense RNAi oligonucleotides. In certain embodiments, the antisense RNAi oligonucleotide has a sugar motif (from 5′ to 3′) of: yfyfyfyfyfyfyfyfyfyfyyy; wherein “y” represents a 2′-O-methylribosyl sugar, and the “f” represents a 2′-fluororibosyl sugar; and a linkage motif (from 5′ to 3′) of: ssooooooooooooooooooss; wherein ‘o’ represents a phosphodiester internucleoside linkage and 's′ represents a phosphorothioate internucleoside linkage.

[0629] The nucleobase sequences of SEQ ID NOs: 2670, 2582, and 2677 are complementary within nucleobases 19600-19642 of SEQ ID NO: 2.

[0630] RNAi compounds 1537312, 1527655, and 1537332 comprise an antisense RNAi oligonucleotide that is complementary within nucleobases 19600-19642 of SEQ ID NO: 2.

[0631] In certain embodiments, modified oligonucleotides complementary within nucleobases 19600-19642 of SEQ ID NO: 2 achieve at least 59% reduction of SPDEF RNA in a standard cell assay. In certain embodiments, modified oligonucleotides complementary within nucleobases 19600-19642 of SEQ ID NO: 2 achieve an average of 67% reduction of SPDEF RNA in a standard cell assay.

[0632] 12. Nucleobases 19640-19672 of SEQ ID NO: 2

[0633] In certain embodiments, nucleobases 19640-19672 of SEQ ID NO: 2 comprise a hotspot region. In certain embodiments, oligomeric compounds or oligomeric duplexes comprise modified oligonucleotides that are complementary within nucleobases 19640-19672 of SEQ ID NO: 2. In certain embodiments, modified oligonucleotides are 23 nucleobases in length. In certain embodiments, modified oligonucleotides are antisense RNAi oligonucleotides. In certain embodiments, the antisense RNAi oligonucleotide has a sugar motif (from 5′ to 3′) of: yfyfyfyfyfyfyfyfyfyfyyy; wherein “y” represents a 2′-O-methylribosyl sugar, and the “f” represents a 2′-fluororibosyl sugar; and a linkage motif (from 5′ to 3′) of: ssooooooooooooooooooss; wherein ‘o’ represents a phosphodiester internucleoside linkage and 's′ represents a phosphorothioate internucleoside linkage.

[0634] The nucleobase sequences of SEQ ID NOs: 2609, 2606, and 2578 are complementary within nucleobases 19640-19672 of SEQ ID NO: 2.

[0635] RNAi compounds 1528397, 1528231, and 1527651 comprise an antisense RNAi oligonucleotide that is complementary within nucleobases 19640-19672 of SEQ ID NO: 2.

[0636] In certain embodiments, modified oligonucleotides complementary within nucleobases 19640-19672 of SEQ ID NO: 2 achieve at least 33% reduction of SPDEF RNA in a standard cell assay. In certain embodiments, modified oligonucleotides complementary within nucleobases 19640-19672 of SEQ ID NO: 2 achieve an average of 59% reduction of SPDEF RNA in a standard cell assay.

### Nonlimiting Disclosure and Incorporation by Reference

[0637] Each of the literature and patent publications listed herein is incorporated by reference in its entirety.

[0638] While certain compounds, compositions and methods described herein have been described with specificity in accordance with certain embodiments, the following examples serve only to illustrate the compounds described herein and are not intended to limit the same. Each of the references, GenBank accession numbers, and the like recited in the present application is incorporated herein by reference in its entirety.

[0639] Although the sequence listing accompanying this filing identifies each sequence as either “RNA” or “DNA” as required, in reality, those sequences may be modified with any combination of chemical modifications. One of skill in the art will readily appreciate that such designation as “RNA” or “DNA” to describe modified oligonucleotides is, in certain instances, arbitrary. For example, an oligonucleotide comprising a nucleoside comprising a 2′-OH sugar moiety and a thymine base could be described as a DNA having a modified sugar (2′-OH in place of one 2′-H of DNA) or as an RNA having a modified base (thymine (methylated uracil) in place of a uracil of RNA). Accordingly, nucleic acid sequences provided herein, including, but not limited to those in the sequence listing, are intended to encompass nucleic acids containing any combination of natural or modified RNA and/or DNA, including, but not limited to such nucleic acids having modified nucleobases. By way of further example and without limitation, an oligomeric compound having the nucleobase sequence “ATCGATCG” encompasses any oligomeric compounds having such nucleobase sequence, whether modified or unmodified, including, but not limited to, such compounds comprising RNA bases, such as those having sequence “AUCGAUCG” and those having some DNA bases and some RNA bases such as “AUCGATCG” and oligomeric compounds having other modified nucleobases, such as “AT^{m}CGAUCG,” wherein mC indicates a cytosine base comprising a methyl group at the 5-position.

[0640] Certain compounds described herein (e.g., modified oligonucleotides) have one or more asymmetric center and thus give rise to enantiomers, diastereomers, and other stereoisomeric configurations that may be defined, in terms of absolute stereochemistry, as (R) or (S), as a or such as for sugar anomers, or as (D) or (L), such as for amino acids, etc. Compounds provided herein that are drawn or described as having certain stereoisomeric configurations include only the indicated compounds. Compounds provided herein that are drawn or described with undefined stereochemistry include all such possible isomers, including their stereorandom and optically pure forms, unless specified otherwise. Likewise, tautomeric forms of the compounds herein are also included unless otherwise indicated. Unless otherwise indicated, compounds described herein are intended to include corresponding salt forms.

[0641] The compounds described herein include variations in which one or more atoms are replaced with a non-radioactive isotope or radioactive isotope of the indicated element. For example, compounds herein that comprise hydrogen atoms encompass all possible deuterium substitutions for each of the ¹H hydrogen atoms. Isotopic substitutions encompassed by the compounds herein include but are not limited to: ²H or ³H in place of ¹H, ¹³C or ¹⁴C in place of ¹²C, ¹⁵N in place of ¹⁴N, ¹⁷O or ¹⁸O in place of ¹⁶O, and ³³S, ³⁴S, ³⁵S, or ³⁶S in place of ³²S. In certain embodiments, non-radioactive isotopic substitutions may impart new properties on the oligomeric compound that are beneficial for use as a therapeutic or research tool. In certain embodiments, radioactive isotopic substitutions may make the compound suitable for research or diagnostic purposes such as imaging.

### EXAMPLES

[0642] The following examples illustrate certain embodiments of the present disclosure and are not limiting. Moreover, where specific embodiments are provided, the inventors have contemplated generic application of those specific embodiments. For example, disclosure of an oligonucleotide having a particular motif provides reasonable support for additional oligonucleotides having the same or similar motif And, for example, where a particular high-affinity modification appears at a particular position, other high-affinity modifications at the same position are considered suitable, unless otherwise indicated.

### Example 1: Effect of 3-10-3 cEt Gapmer Modified Oligonucleotides on Human SPDEF RNA In Vitro, Single Dose

[0643] Modified oligonucleotides complementary to human SPDEF nucleic acid were tested for their effect on SPDEF RNA levels in vitro.

[0644] The newly designed modified oligonucleotides in the tables below were designed as 3-10-3 cEt gapmers. The gapmers are 16 nucleosides in length, wherein the central gap segment comprises of ten 2′-deoxynucleosides and is flanked by wing segments on the 5′ direction and the 3′ direction comprising three nucleosides each. Each nucleoside in the 5′ wing segment and each nucleoside in the 3′ wing segment has a cEt sugar modification. The internucleoside linkages throughout each gapmer are phosphorothioate (P═S) linkages. All cytosine residues throughout each gapmer are 5-methylcytosines.

[0645] “Start site” indicates the 5′-most nucleoside to which the modified oligonucleotide is complementary in the human gene sequence. “Stop site” indicates the 3′-most nucleoside to which the modified oligonucleotide is complementary in the human gene sequence. Each modified oligonucleotide listed in the Tables below is 100% complementary to SEQ ID NO: 1 (GENBANK Accession No. NM_012391.2), SEQ ID NO: 2 (the complement of GENBANK Accession No. NC_000006.12 truncated from nucleotides 34536001 to 34558000), SEQ ID NO: 3 (GENBANK Accession No. NM_001252294.1), SEQ ID NO: 4 (GENBANK Accession No. XM_005248988.3) or SEQ ID NO: 5 (GENBANK Accession No. XM 006715048.1). ‘N/A’ indicates that the modified oligonucleotide is not 100% complementary to that particular gene sequence.

[0646] Cultured VCaP cells at a density of 20,000 cells per well were treated with 4 μM modified oligonucleotide by electroporation. After a treatment period of approximately 24 hours, total RNA was isolated from the cells and SPDEF RNA levels were measured by quantitative real-time RTPCR. Human SPDEF primer probe set RTS35007 (forward sequence CGCTTCATTAGGTGGCTCAA, designated herein as SEQ ID NO: 6; reverse sequence GCTCAGCTTGTCGTAGTTCA, designated herein as SEQ ID NO: 7; probe sequence AATTGAGGACTCAGCCCAGGTGG, designated herein as SEQ ID NO: 8) was used to measure RNA levels. SPDEF RNA levels were normalized to total RNA content, as measured by RIBOGREEN®. Reduction of SPDEF RNA is presented in the tables below as percent SPDEF RNA levels relative to untreated control (UTC) cells. Each table represents results from an individual assay plate. The modified oligonucleotides marked with an asterisk (*) indicate that the modified oligonucleotide is complementary to the amplicon region of the primer probe set. Additional assays may be used to measure the potency and efficacy of the modified oligonucleotides complementary to the amplicon region.

TABLE 1
Reduction of SPDEF RNA by 4 μM 3-10-3 cEt gapmers with a
phosphorothioate backbone

| | SEQ | SEQ | SEQ | SEQ | | | |
|---|---|---|---|---|---|---|---|
| | ID | ID | ID | ID | | | |
| | NO: 1 | NO: 1 | NO: 2 | NO: 2 | | SPDEF | |
| Compound | Start | Stop | Start | Stop | | (% | SEQ |
| Number | Site | Site | Site | Site | Sequence (5′ to 3′) | UTC) | ID NO |
| 652519* | 1353 | 1368 | 19638 | 19653 | ACTGGCGGATGGAGCG | 123 | 15 |
| 652522 | 1362 | 1377 | 19647 | 19662 | TCTTGTAATACTGGCG | 57 | 16 |
| 652635 | N/A | N/A | 8818 | 8833 | ACATGTCTGGATTAAG | 44 | 17 |
| 801677 | 12 | 27 | 1679 | 1694 | AGTCAGACAGCCGCGA | 68 | 18 |
| 801682 | 46 | 61 | 1713 | 1728 | GGACACGGCAGAGTGC | 75 | 19 |
| 801688 | 75 | 90 | 1742 | 1757 | CTTGGAGGACTGGGTC | 96 | 20 |
| 801694 | 124 | 139 | 1791 | 1806 | CACCGTGGCAAGGCCC | 68 | 21 |
| 801700 | 167 | 182 | 1834 | 1849 | CCTGTAGGGAGTCCCC | 62 | 22 |
| 801706 | 278 | 293 | 1945 | 1960 | GCCAGCGGAACCAGGG | 56 | 23 |
| 801712 | 390 | 405 | 2057 | 2072 | CTGTTAGCTGCCTGGT | 66 | 24 |
| 801718 | 417 | 432 | 13528 | 13543 | CGCTGCTGTTTGGGCT | 95 | 25 |
| 801724 | 450 | 465 | 13561 | 13576 | CGCTGCTCAGACCCGG | 66 | 26 |
| 801730 | 500 | 515 | 13611 | 13626 | GCCTGTCCGCGACACC | 45 | 27 |
| 801736 | 542 | 557 | 13653 | 13668 | CCGTCTCTCGAGACCC | 55 | 28 |
| 801742 | 562 | 577 | 13673 | 13688 | GGTGGACTGGGACTCC | 81 | 29 |
| 801748 | 599 | 614 | 13710 | 13725 | GAGGTAGAAGGCGGAC | 78 | 30 |
| 801754 | 624 | 639 | 13735 | 13750 | CAGGGTACAGCATGTC | 58 | 31 |
| 801760 | 678 | 693 | 13789 | 13804 | GTGGCTCCTCCCGACT | 61 | 32 |
| 801766 | 712 | 727 | 13823 | 13838 | CTGTCAATGACCGGGC | 37 | 33 |
| 801772 | 755 | 770 | 13866 | 13881 | CAGCCCGCCGGGCACC | 62 | 34 |
| 801778 | 779 | 794 | 13890 | 13905 | CTCCAGCGAGTGCTCC | 105 | 35 |
| 801784 | 807 | 822 | 13918 | 13933 | CTTCGCCCACCACCAT | 90 | 36 |
| 801790 | 828 | 843 | 13939 | 13954 | CCGTCTCGATGTCCTT | 51 | 37 |
| 801795 | 854 | 869 | 13965 | 13980 | TGCGGTGATGTTGAGC | 93 | 38 |
| 801801 | 873 | 888 | 16822 | 16837 | GGCTCCAGTCCATGGG | 87 | 39 |
| 801807 | 926 | 941 | 16875 | 16890 | GGGCAGCCGGTATTGG | 112 | 40 |
| 801813 | 988 | 1003 | 16937 | 16952 | TGCTCCTCCGACATGG | 69 | 41 |
| 801819 | 1052 | 1067 | 17001 | 17016 | TGACTTCCAGATGTCC | 101 | 42 |
| 801823 | 1081 | 1096 | 18451 | 18466 | GGTGAAGTCCGCTCTT | 83 | 43 |
| 801829 | 1100 | 1115 | 18470 | 18485 | ACAGTAGTGAATCGCC | 70 | 44 |
| 801835 | 1130 | 1145 | 18618 | 18633 | GTCGGTCCAGCTCTCC | 88 | 45 |
| 801841 | 1151 | 1166 | 18639 | 18654 | GCATGATGAGTCCACC | 92 | 46 |
| 801847 | 1170 | 1185 | 18658 | 18673 | GGTGGATGGGCTGCCC | 54 | 47 |
| 801853 | 1202 | 1217 | 18690 | 18705 | CTTGAGTAGCAACTCC | 51 | 48 |
| 801856* | 1231 | 1246 | 18719 | 18734 | CACCTAATGAAGCGGC | 45 | 49 |
| 801862* | 1274 | 1289 | 19559 | 19574 | GGCTGAGTCCTCAATT | 53 | 50 |
| 801868* | 1311 | 1326 | 19596 | 19611 | GACGGTTCTTGCGGAT | 12 | 51 |
| 801874* | 1340 | 1355 | 19625 | 19640 | GCGGCTCAGCTTGTCG | 29 | 52 |
| 801879 | 1370 | 1385 | 19655 | 19670 | GATGCCCTTCTTGTAA | 63 | 53 |
| 801885 | 1393 | 1408 | 19678 | 19693 | TGGGAGATGTCTGGCT | 98 | 54 |
| 801891 | 1420 | 1435 | 19705 | 19720 | GGGTGCACGAACTGGT | 57 | 55 |
| 801897 | 1577 | 1592 | 19862 | 19877 | GGCAGTTGGTTGCCCC | 61 | 56 |
| 801903 | 1616 | 1631 | 19901 | 19916 | CAGGGTCCCGAAGGCC | 85 | 57 |
| 801909 | 1746 | 1761 | 20031 | 20046 | GTCGAGTCACTGCCCT | 36 | 58 |
| 801915 | 1810 | 1825 | 20095 | 20110 | GTGTGGTGCAGAATGG | 94 | 59 |
| 801927 | N/A | N/A | 5131 | 5146 | CAGAGACACATCCCCC | 53 | 60 |
| 801933 | N/A | N/A | 2358 | 2373 | GCACGGCGGCCTCCCC | 44 | 61 |
| 801939 | N/A | N/A | 2825 | 2840 | GGGCACCCAGTCGCCC | 81 | 62 |
| 801945 | N/A | N/A | 3317 | 3332 | GGGTCCTTGGCTCTGG | 67 | 63 |
| 801951 | N/A | N/A | 3825 | 3840 | GTCCCCCTGTCAGACT | 65 | 64 |
| 801957 | N/A | N/A | 4235 | 4250 | GGGCGAGAGAGTGGAG | 86 | 65 |
| 801963 | N/A | N/A | 4916 | 4931 | ATCCTGGTGGTGCGCC | 86 | 66 |
| 801969 | N/A | N/A | 5446 | 5461 | TGCGGCCCCTCCAGAC | 70 | 67 |
| 801975 | N/A | N/A | 5818 | 5833 | TGAAGGGCCGGCCACA | 65 | 68 |
| 801981 | N/A | N/A | 6181 | 6196 | CAGTGCCTCCCCGCCT | 52 | 69 |
| 801987 | N/A | N/A | 6549 | 6564 | GGTGAGTCCCTGGTCC | 75 | 70 |
| 801993 | N/A | N/A | 7033 | 7048 | GCACTACTTCCAGCGC | 89 | 71 |
| 801999 | N/A | N/A | 7406 | 7421 | TCTCCGGGCTTTCCCC | 43 | 72 |
| 802005 | N/A | N/A | 7920 | 7935 | GGGCTACCCAGGCCTC | 90 | 73 |
| 802011 | N/A | N/A | 8293 | 8308 | ATGTATCCTCACCCCT | 63 | 74 |
| 802022 | N/A | N/A | 9208 | 9223 | CCCCAGCGAGCCCTCC | 61 | 75 |
| 802028 | N/A | N/A | 9790 | 9805 | GCGGACAGTGAGGCTC | 55 | 76 |
| 802034 | N/A | N/A | 10241 | 10256 | GACTCCTGGCTCGGGC | 74 | 77 |
| 802040 | N/A | N/A | 10829 | 10844 | CCCTTGTGGCCCTCCT | 60 | 78 |
| 802045 | N/A | N/A | 11422 | 11437 | TCCCCCTGGATAGCAT | 56 | 79 |
| 802051 | N/A | N/A | 12032 | 12047 | CGTCAAGCCAGAGGCA | 43 | 80 |
| 802057 | N/A | N/A | 12815 | 12830 | TGGTACCCACCTCCCC | 65 | 81 |
| 802063 | N/A | N/A | 13512 | 13527 | GGCGGCTGTGTCTACG | 80 | 82 |
| 802069 | N/A | N/A | 14448 | 14463 | GCTCATGGGCAGCAAT | 65 | 83 |
| 802075 | N/A | N/A | 15727 | 15742 | CTGCAATGCCAGGGCC | 51 | 84 |
| 802081 | N/A | N/A | 16172 | 16187 | GCCCTTGGCTAGGTCC | 61 | 85 |
| 802087 | N/A | N/A | 16666 | 16681 | GGGCCCCTGTGGAAGT | 88 | 86 |
| 802093 | N/A | N/A | 17204 | 17219 | GGCCTTGACCAGGGCT | 77 | 87 |
| 802099 | N/A | N/A | 18204 | 18219 | GGCTTGCATGCAACCC | 62 | 88 |
| 802105 | N/A | N/A | 18596 | 18611 | GTCGAGGCTGGGTGGC | 109 | 89 |
| 802111* | N/A | N/A | 19067 | 19082 | ATTCTCAGGCAGTTCG | 52 | 90 |
| 802117* | N/A | N/A | 19522 | 19537 | GGGCCCCGAGAGAGCC | 105 | 91 |

TABLE 2
Reduction of SPDEF RNA by 4 μM 3-10-3 cEt gapmers with a
phosphorothioate backbone

| | SEQ | SEQ | SEQ | SEQ | | | |
|---|---|---|---|---|---|---|---|
| | ID | ID | ID | ID | | | |
| | NO: 1 | NO: 1 | NO: 2 | NO: 2 | | SPDEF | |
| Compound | Start | Stop | Start | Stop | | (% | SEQ |
| Number | Site | Site | Site | Site | Sequence (5′ to 3′) | UTC) | ID NO |
| 652365 | 33 | 48 | 1700 | 1715 | TGCAGGAATGTGCTGG | 81 | 92 |
| 652522 | 1362 | 1377 | 19647 | 19662 | TCTTGTAATACTGGCG | 73 | 16 |
| 652649 | N/A | N/A | 10940 | 10955 | CCCGTCCACATCCCCA | 68 | 93 |
| 791840 | 1056 | 1071 | N/A | N/A | CCGCTGACTTCCAGAT | 84 | 94 |
| 791899 | 1355 | 1370 | 19640 | 19655 | ATACTGGCGGATGGAG | 103 | 95 |
| 801683 | 48 | 63 | 1715 | 1730 | GTGGACACGGCAGAGT | 59 | 96 |
| 801689 | 77 | 92 | 1744 | 1759 | GGCTTGGAGGACTGGG | 78 | 97 |
| 801695 | 126 | 141 | 1793 | 1808 | GGCACCGTGGCAAGGC | 105 | 98 |
| 801701 | 171 | 186 | 1838 | 1853 | CGTGCCTGTAGGGAGT | 89 | 99 |
| 801707 | 280 | 295 | 1947 | 1962 | GGGCCAGCGGAACCAG | 94 | 100 |
| 801713 | 398 | 413 | N/A | N/A | GGCTGTGTCTGTTAGC | 92 | 101 |
| 801719 | 420 | 435 | 13531 | 13546 | TGCCGCTGCTGTTTGG | 79 | 102 |
| 801725 | 453 | 468 | 13564 | 13579 | ATACGCTGCTCAGACC | 82 | 103 |
| 801731 | 502 | 517 | 13613 | 13628 | AAGCCTGTCCGCGACA | 65 | 104 |
| 801737 | 545 | 560 | 13656 | 13671 | GTCCCGTCTCTCGAGA | 76 | 105 |
| 801743 | 569 | 584 | 13680 | 13695 | CGTGGCGGGTGGACTG | 88 | 106 |
| 801749 | 602 | 617 | 13713 | 13728 | GGAGAGGTAGAAGGCG | 86 | 107 |
| 801755 | 627 | 642 | 13738 | 13753 | CCTCAGGGTACAGCAT | 91 | 108 |
| 801761 | 684 | 699 | 13795 | 13810 | CCTCAGGTGGCTCCTC | 87 | 109 |
| 801767 | 714 | 729 | 13825 | 13840 | GGCTGTCAATGACCGG | 70 | 110 |
| 801773 | 758 | 773 | 13869 | 13884 | GGTCAGCCCGCCGGGC | 76 | 111 |
| 801779 | 782 | 797 | 13893 | 13908 | CTGCTCCAGCGAGTGC | 81 | 112 |
| 801785 | 812 | 827 | 13923 | 13938 | GAGCACTTCGCCCACC | 60 | 113 |
| 801791 | 830 | 845 | 13941 | 13956 | GGCCGTCTCGATGTCC | 123 | 114 |
| 801796 | 857 | 872 | N/A | N/A | ATCTGCGGTGATGTTG | 92 | 115 |
| 801802 | 907 | 922 | 16856 | 16871 | TCTGTCCACAGGAGCC | 72 | 116 |
| 801808 | 965 | 980 | 16914 | 16929 | CTCCTTGCCCGCCAGC | 58 | 117 |
| 801814 | 991 | 1006 | 16940 | 16955 | AACTGCTCCTCCGACA | 87 | 118 |
| 801824 | 1083 | 1098 | 18453 | 18468 | CAGGTGAAGTCCGCTC | 79 | 119 |
| 801830 | 1103 | 1118 | N/A | N/A | GGCACAGTAGTGAATC | 107 | 120 |
| 801836 | 1134 | 1149 | 18622 | 18637 | CGCTGTCGGTCCAGCT | 94 | 121 |
| 801842 | 1154 | 1169 | 18642 | 18657 | GGAGCATGATGAGTCC | 95 | 122 |
| 801848 | 1175 | 1190 | 18663 | 18678 | CCACAGGTGGATGGGC | 99 | 123 |
| 801854 | 1204 | 1219 | 18692 | 18707 | GGCTTGAGTAGCAACT | 68 | 124 |
| 801857* | 1233 | 1248 | 18721 | 18736 | GCCACCTAATGAAGCG | 56 | 125 |
| 801863* | 1294 | 1309 | 19579 | 19594 | CCCCACAGCCGGGCCA | 85 | 126 |
| 801869* | 1313 | 1328 | 19598 | 19613 | GGGACGGTTCTTGCGG | 12 | 127 |
| 801875* | 1341 | 1356 | 19626 | 19641 | AGCGGCTCAGCTTGTC | 24 | 128 |
| 801880 | 1373 | 1388 | 19658 | 19673 | GATGATGCCCTTCTTG | 96 | 129 |
| 801886 | 1397 | 1412 | 19682 | 19697 | GCGCTGGGAGATGTCT | 93 | 130 |
| 801892 | 1455 | 1470 | 19740 | 19755 | GGCGGGTTTCAGGCCC | 86 | 131 |
| 801898 | 1592 | 1607 | 19877 | 19892 | CCCATATCCCCCTGGG | 85 | 132 |
| 801904 | 1620 | 1635 | 19905 | 19920 | GCCCCAGGGTCCCGAA | 62 | 133 |
| 801910 | 1753 | 1768 | 20038 | 20053 | GGCCTTTGTCGAGTCA | 76 | 134 |
| 801916 | 1836 | 1851 | 20121 | 20136 | GCAGATGTCTCCCTGC | 78 | 135 |
| 801928 | N/A | N/A | 5143 | 5158 | GTGAAGTGTCAGCAGA | 62 | 136 |
| 801934 | N/A | N/A | 2444 | 2459 | AGCTGGGTTGGCAGCA | 86 | 137 |
| 801940 | N/A | N/A | 2904 | 2919 | CGCACGCGCACATGCA | 86 | 138 |
| 801946 | N/A | N/A | 3374 | 3389 | CCGAGAATGCCCCCCA | 50 | 139 |
| 801952 | N/A | N/A | 3891 | 3906 | CCCGCCCACGGTCCCA | 86 | 140 |
| 801958 | N/A | N/A | 4485 | 4500 | AGTGACTCAGCCCCCT | 50 | 141 |
| 801964 | N/A | N/A | 4993 | 5008 | TGGAGCCCCGGGCTGG | 80 | 142 |
| 801970 | N/A | N/A | 5503 | 5518 | GTCTCCCGAGAGGTGT | 86 | 143 |
| 801976 | N/A | N/A | 5887 | 5902 | GCCCGGGTCACATGGC | 100 | 144 |
| 801982 | N/A | N/A | 6230 | 6245 | GTCCTGCACCTCACCA | 62 | 145 |
| 801988 | N/A | N/A | 6595 | 6610 | GGTGCAGGTGACACCC | 100 | 146 |
| 801994 | N/A | N/A | 7124 | 7139 | TCCCACGGGCAGCAGG | 82 | 147 |
| 802000 | N/A | N/A | 7615 | 7630 | GACCACCCCGCTGCCC | 95 | 148 |
| 802006 | N/A | N/A | 8000 | 8015 | GGCCAGGTCTTGGCCA | 95 | 149 |
| 802012 | N/A | N/A | 8343 | 8358 | GGTCCCGGCTCTCAGG | 93 | 150 |
| 802017 | N/A | N/A | 8892 | 8907 | GTCCCACGGGCTGCCG | 79 | 151 |
| 802023 | N/A | N/A | 9290 | 9305 | TGCCCCTGTGCTGTGG | 65 | 152 |
| 802029 | N/A | N/A | 9877 | 9892 | AGTGCCACGCCCAGGC | 48 | 153 |
| 802035 | N/A | N/A | 10323 | 10338 | GGCCCAGGTCTTATTC | 73 | 154 |
| 802046 | N/A | N/A | 11472 | 11487 | GGCCACAGCTAGCCCA | 83 | 155 |
| 802052 | N/A | N/A | 12207 | 12222 | GGGTGCCTGATTCTCC | 62 | 156 |
| 802058 | N/A | N/A | 12920 | 12935 | TCCCACAGGGCTATCT | 111 | 157 |
| 802064 | N/A | N/A | 13970 | 13985 | TCACCTGCGGTGATGT | 84 | 158 |
| 802070 | N/A | N/A | 14586 | 14601 | GATATGGTGCGGCACG | 93 | 159 |
| 802076 | N/A | N/A | 15785 | 15800 | GGCCTGAGGGATGCAT | 77 | 160 |
| 802082 | N/A | N/A | 16248 | 16263 | ACATGTGTTGAATAAG | 81 | 161 |
| 802088 | N/A | N/A | 16735 | 16750 | TGGGAACCTGTGGCCT | 79 | 162 |
| 802094 | N/A | N/A | 17292 | 17307 | CACGGTTGTCCCCAGC | 38 | 163 |
| 802100 | N/A | N/A | 18279 | 18294 | GGGAGGCAAGCTGGTT | 93 | 164 |
| 802106* | N/A | N/A | 18759 | 18774 | CGCCCCTTGGGCACCC | 78 | 165 |
| 802112* | N/A | N/A | 19068 | 19083 | TATTCTCAGGCAGTTC | 48 | 166 |
| 802118 | N/A | N/A | 20192 | 20207 | GGGACATGTCAGTTCT | 87 | 167 |

TABLE 3
Reduction of SPDEF RNA by 4 μM 3-10-3 cEt gapmers with a
phosphorothioate backbone

| | SEQ | SEQ | SEQ | SEQ | | | |
|---|---|---|---|---|---|---|---|
| | ID | ID | ID | ID | | | |
| | NO: 1 | NO: 1 | NO: 2 | NO: 2 | | | |
| Compound | Start | Stop | Start | Stop | | SPDEF (% | SEQ |
| Number | Site | Site | Site | Site | Sequence (5′ to 3′) | UTC) | ID NO |
| 652481 | 1063 | 1078 | N/A | N/A | ATCCAGGCCGCTGACT | 94 | 168 |
| 652522 | 1362 | 1377 | 19647 | 19662 | TCTTGTAATACTGGCG | 51 | 16 |
| 791875* | 1220 | 1235 | 18708 | 18723 | GCGGCCATAGCTGTGG | 87 | 169 |
| 791900 | 1357 | 1372 | 19642 | 19657 | TAATACTGGCGGATGG | 89 | 170 |
| 801673 | 2 | 17 | 1669 | 1684 | CCGCGAGATGAAGAGT | 103 | 171 |
| 801678 | 36 | 51 | 1703 | 1718 | GAGTGCAGGAATGTGC | 62 | 172 |
| 801684 | 52 | 67 | 1719 | 1734 | CAGTGTGGACACGGCA | 58 | 173 |
| 801690 | 82 | 97 | 1749 | 1764 | CAGCAGGCTTGGAGGA | 48 | 174 |
| 801696 | 130 | 145 | 1797 | 1812 | TGCTGGCACCGTGGCA | 121 | 175 |
| 801702 | 233 | 248 | 1900 | 1915 | TCAGGTTGGCCACTGG | 93 | 176 |
| 801708 | 337 | 352 | 2004 | 2019 | GCCGGGAAGAGGTGTG | 72 | 177 |
| 801714 | 401 | 416 | N/A | N/A | GGCGGCTGTGTCTGTT | 120 | 178 |
| 801720 | 422 | 437 | 13533 | 13548 | CATGCCGCTGCTGTTT | 83 | 179 |
| 801726 | 456 | 471 | 13567 | 13582 | GGGATACGCTGCTCAG | 61 | 180 |
| 801732 | 506 | 521 | 13617 | 13632 | CTCCAAGCCTGTCCGC | 71 | 181 |
| 801738 | 550 | 565 | 13661 | 13676 | CTCCAGTCCCGTCTCT | 70 | 182 |
| 801744 | 584 | 599 | 13695 | 13710 | CAGGCCCTGCTCGGGC | 100 | 183 |
| 801750 | 606 | 621 | 13717 | 13732 | AGTAGGAGAGGTAGAA | 80 | 184 |
| 801756 | 629 | 644 | 13740 | 13755 | GTCCTCAGGGTACAGC | 56 | 185 |
| 801762 | 693 | 708 | 13804 | 13819 | GCTCAGGCTCCTCAGG | 80 | 186 |
| 801768 | 719 | 734 | 13830 | 13845 | GGCTTGGCTGTCAATG | 75 | 187 |
| 801774 | 761 | 776 | 13872 | 13887 | CAAGGTCAGCCCGCCG | 64 | 188 |
| 801780 | 784 | 799 | 13895 | 13910 | ACCTGCTCCAGCGAGT | 62 | 189 |
| 801786 | 815 | 830 | 13926 | 13941 | CTTGAGCACTTCGCCC | 61 | 190 |
| 801792 | 833 | 848 | 13944 | 13959 | GCAGGCCGTCTCGATG | 102 | 191 |
| 801797 | 860 | 875 | N/A | N/A | GGGATCTGCGGTGATG | 85 | 192 |
| 801803 | 916 | 931 | 16865 | 16880 | TATTGGTGCTCTGTCC | 49 | 193 |
| 801809 | 967 | 982 | 16916 | 16931 | AGCTCCTTGCCCGCCA | 80 | 194 |
| 801815 | 995 | 1010 | 16944 | 16959 | GCGGAACTGCTCCTCC | 73 | 195 |
| 801825 | 1087 | 1102 | 18457 | 18472 | GCCCCAGGTGAAGTCC | 95 | 196 |
| 801831 | 1106 | 1121 | N/A | N/A | CGAGGCACAGTAGTGA | 92 | 197 |
| 801837 | 1138 | 1153 | 18626 | 18641 | ACCTCGCTGTCGGTCC | 73 | 198 |
| 801843 | 1156 | 1171 | 18644 | 18659 | CCGGAGCATGATGAGT | 90 | 199 |
| 801849 | 1177 | 1192 | 18665 | 18680 | TGCCACAGGTGGATGG | 73 | 200 |
| 801858* | 1238 | 1253 | 18726 | 18741 | GTTGAGCCACCTAATG | 27 | 201 |
| 801864* | 1296 | 1311 | 19581 | 19596 | TGCCCCACAGCCGGGC | 73 | 202 |
| 801870* | 1315 | 1330 | 19600 | 19615 | GCGGGACGGTTCTTGC | 19 | 203 |
| 801876* | 1343 | 1358 | 19628 | 19643 | GGAGCGGCTCAGCTTG | 55 | 204 |
| 801881 | 1376 | 1391 | 19661 | 19676 | CCGGATGATGCCCTTC | 54 | 205 |
| 801887 | 1409 | 1424 | 19694 | 19709 | CTGGTAGACGAGGCGC | 88 | 206 |
| 801893 | 1518 | 1533 | 19803 | 19818 | TGCCCGTTTTCCCCCA | 63 | 207 |
| 801899 | 1597 | 1612 | 19882 | 19897 | GAGGACCCATATCCCC | 63 | 208 |
| 801905 | 1634 | 1649 | 19919 | 19934 | GAGGAAGCACCCCTGC | 76 | 209 |
| 801911 | 1755 | 1770 | 20040 | 20055 | GTGGCCTTTGTCGAGT | 58 | 210 |
| 801917 | 1838 | 1853 | 20123 | 20138 | GTGCAGATGTCTCCCT | 48 | 211 |
| 801929 | N/A | N/A | 5145 | 5160 | CTGTGAAGTGTCAGCA | 50 | 212 |
| 801935 | N/A | N/A | 2490 | 2505 | GCCCACTGGTGGCCTG | 102 | 213 |
| 801941 | N/A | N/A | 2997 | 3012 | GCTGGGCGGCCCCAGC | 96 | 214 |
| 801947 | N/A | N/A | 3430 | 3445 | GGGTCCCCTACGCAGT | 67 | 215 |
| 801953 | N/A | N/A | 3978 | 3993 | CCTCCGTGAAGCCTGC | 51 | 216 |
| 801959 | N/A | N/A | 4606 | 4621 | GCCACTCGCTTGGCTG | 80 | 217 |
| 801965 | N/A | N/A | 5080 | 5095 | GGAGCTAGGTCCCAGC | 30 | 218 |
| 801971 | N/A | N/A | 5624 | 5639 | GCCCCTTGGCCGATCC | 64 | 219 |
| 801977 | N/A | N/A | 5965 | 5980 | TGCCCCCGTCAGGCCT | 54 | 220 |
| 801983 | N/A | N/A | 6293 | 6308 | GATGTCTGGAGGCTCT | 45 | 221 |
| 801989 | N/A | N/A | 6686 | 6701 | AGGCCCACCGCAGCCC | 82 | 222 |
| 801995 | N/A | N/A | 7184 | 7199 | GGGCACTGGAAGCCAA | 64 | 223 |
| 802001 | N/A | N/A | 7671 | 7686 | CCCTTCCTTACGGCCC | 54 | 224 |
| 802007 | N/A | N/A | 8060 | 8075 | CCATCCATCCAAGTCC | 64 | 225 |
| 802013 | N/A | N/A | 8392 | 8407 | AGGACCCAGGTCGCTG | 62 | 226 |
| 802018 | N/A | N/A | 8950 | 8965 | GC CATGTCCAGGGTCC | 58 | 227 |
| 802024 | N/A | N/A | 9368 | 9383 | CAGCAGGGTCCGGACC | 96 | 228 |
| 802030 | N/A | N/A | 9974 | 9989 | GGTGTGCCCAACCTGC | 45 | 229 |
| 802036 | N/A | N/A | 10580 | 10595 | CGCTCTGTCGAGTGCA | 65 | 230 |
| 802041 | N/A | N/A | 10994 | 11009 | ACCCCCCCCCGCAGCC | 79 | 231 |
| 802047 | N/A | N/A | 11564 | 11579 | GACCCGCGCAGCCTCC | 59 | 232 |
| 802053 | N/A | N/A | 12363 | 12378 | AGACAGGCTCAGTGCA | 45 | 233 |
| 802059 | N/A | N/A | 12957 | 12972 | CCCTCCCACACGCCGG | 71 | 234 |
| 802065 | N/A | N/A | 14038 | 14053 | CCGACCCACCCCAGCG | 59 | 235 |
| 802071 | N/A | N/A | 14618 | 14633 | GTGGAGGACACAGAGA | 70 | 236 |
| 802077 | N/A | N/A | 15878 | 15893 | GTCGGCCTGGCATGGG | 78 | 237 |
| 802083 | N/A | N/A | 16311 | 16326 | GGGCACTCCATCCCCT | 92 | 238 |
| 802089 | N/A | N/A | 16795 | 16810 | AGGCATCCCCTCAGCT | 65 | 239 |
| 802095 | N/A | N/A | 17525 | 17540 | TTCATAGACTTTCCCT | 38 | 240 |
| 802101 | N/A | N/A | 18385 | 18400 | GCCCCGAGGGTGGAGG | 90 | 241 |
| 802107* | N/A | N/A | 18818 | 18833 | CCCCCATGCACCGTGC | 83 | 242 |
| 802113* | N/A | N/A | 19156 | 19171 | CAGCAGTGCCCACGGC | 66 | 243 |

TABLE 4
Reduction of SPDEF RNA by 4 μM 3-10-3 cEt gapmers
with a phosphorothioate backbone

| | SEQ | SEQ | SEQ | SEQ | | | |
|---|---|---|---|---|---|---|---|
| | ID | ID | ID | ID | | | |
| | NO: 1 | NO: 1 | NO: 2 | NO: 2 | | | |
| Compound | Start | Stop | Start | Stop | | SPDEF (% | SEQ |
| Number | Site | Site | Site | Site | Sequence (5′ to 3′) | UTC) | ID NO |
| 652522 | 1362 | 1377 | 19647 | 19662 | TCTTGTAATACTGGCG | 62 | 16 |
| 791876* | 1223 | 1238 | 18711 | 18726 | GAAGCGGCCATAGCTG | 79 | 244 |
| 791902 | 1360 | 1375 | 19645 | 19660 | TTGTAATACTGGCGGA | 59 | 245 |
| 801674 | 5 | 20 | 1672 | 1687 | CAGCCGCGAGATGAAG | 80 | 246 |
| 801679 | 39 | 54 | 1706 | 1721 | GCAGAGTGCAGGAATG | 85 | 247 |
| 801685 | 54 | 69 | 1721 | 1736 | GGCAGTGTGGACACGG | 68 | 248 |
| 801691 | 115 | 130 | 1782 | 1797 | AAGGCCCAACCTGAGG | 87 | 249 |
| 801697 | 132 | 147 | 1799 | 1814 | CCTGCTGGCACCGTGG | 83 | 250 |
| 801703 | 235 | 250 | 1902 | 1917 | ACTCAGGTTGGCCACT | 65 | 251 |
| 801709 | 357 | 372 | 2024 | 2039 | CTGCAGTGCCAACTTC | 59 | 252 |
| 801715 | 406 | 421 | 13517 | 13532 | GGGCTGGCGGCTGTGT | 91 | 253 |
| 801721 | 425 | 440 | 13536 | 13551 | GCCCATGCCGCTGCTG | 60 | 254 |
| 801727 | 492 | 507 | 13603 | 13618 | GCGACACCGTGTCGGG | 48 | 255 |
| 801733 | 515 | 530 | 13626 | 13641 | TGCCGCCTTCTCCAAG | 70 | 256 |
| 801739 | 552 | 567 | 13663 | 13678 | GACTCCAGTCCCGTCT | 113 | 257 |
| 801745 | 590 | 605 | 13701 | 13716 | GGCGGACAGGCCCTGC | 104 | 258 |
| 801751 | 611 | 626 | 13722 | 13737 | GTCAAAGTAGGAGAGG | 57 | 259 |
| 801757 | 669 | 684 | 13780 | 13795 | CCCGACTGCTGGCCCC | 47 | 260 |
| 801763 | 702 | 717 | 13813 | 13828 | CCGGGCACTGCTCAGG | 68 | 261 |
| 801769 | 737 | 752 | 13848 | 13863 | GTCCAGGCTGCCCGCT | 94 | 262 |
| 801775 | 763 | 778 | 13874 | 13889 | TCCAAGGTCAGCCCGC | 57 | 263 |
| 801781 | 792 | 807 | 13903 | 13918 | TGGACTGCACCTGCTC | 50 | 264 |
| 801787 | 817 | 832 | 13928 | 13943 | TCCTTGAGCACTTCGC | 61 | 265 |
| 801793 | 836 | 851 | 13947 | 13962 | CTTGCAGGCCGTCTCG | 73 | 266 |
| 801798 | 863 | 878 | N/A | N/A | CATGGGATCTGCGGTG | 72 | 267 |
| 801804 | 918 | 933 | 16867 | 16882 | GGTATTGGTGCTCTGT | 49 | 268 |
| 801810 | 973 | 988 | 16922 | 16937 | GCGCACAGCTCCTTGC | 89 | 269 |
| 801816 | 999 | 1014 | 16948 | 16963 | GCTGGCGGAACTGCTC | 80 | 270 |
| 801820 | 1065 | 1080 | N/A | N/A | TCATCCAGGCCGCTGA | 54 | 271 |
| 801826 | 1092 | 1107 | 18462 | 18477 | GAATCGCCCCAGGTGA | 74 | 272 |
| 801832 | 1109 | 1124 | N/A | N/A | GGTCGAGGCACAGTAG | 95 | 273 |
| 801838 | 1142 | 1157 | 18630 | 18645 | GTCCACCTCGCTGTCG | 64 | 274 |
| 801844 | 1158 | 1173 | 18646 | 18661 | GCCCGGAGCATGATGA | 113 | 275 |
| 801850 | 1181 | 1196 | 18669 | 18684 | GAACTGCCACAGGTGG | 49 | 276 |
| 801859* | 1242 | 1257 | 18730 | 18745 | CCTTGTTGAGCCACCT | 22 | 277 |
| 801865* | 1301 | 1316 | 19586 | 19601 | GCGGATGCCCCACAGC | 23 | 278 |
| 801871* | 1319 | 1334 | 19604 | 19619 | CATGGCGGGACGGTTC | 17 | 279 |
| 801877* | 1346 | 1361 | 19631 | 19646 | GATGGAGCGGCTCAGC | 61 | 280 |
| 801882 | 1381 | 1396 | 19666 | 19681 | GGCTTCCGGATGATGC | 74 | 281 |
| 801888 | 1411 | 1426 | 19696 | 19711 | AACTGGTAGACGAGGC | 57 | 282 |
| 801894 | 1520 | 1535 | 19805 | 19820 | ACTGCCCGTTTTCCCC | 42 | 283 |
| 801900 | 1601 | 1616 | 19886 | 19901 | CCCAGAGGACCCATAT | 75 | 284 |
| 801906 | 1684 | 1699 | 19969 | 19984 | GGGAGCAGCCCTGTCT | 69 | 285 |
| 801912 | 1758 | 1773 | 20043 | 20058 | CCTGTGGCCTTTGTCG | 63 | 286 |
| 801918 | 1881 | 1896 | 20166 | 20181 | TATTATCCATTCCCGG | 55 | 287 |
| 801924 | N/A | N/A | 18603 | 18618 | CTCACTGGTCGAGGCT | 98 | 288 |
| 801930 | N/A | N/A | 2124 | 2139 | TCGCCCACCCCCCAGC | 38 | 289 |
| 801936 | N/A | N/A | 2550 | 2565 | GTCCCGAACTGGACCC | 72 | 290 |
| 801942 | N/A | N/A | 3082 | 3097 | CCAGCCCTGGCCGAGG | 61 | 291 |
| 801948 | N/A | N/A | 3502 | 3517 | TGGATACCCCCACGGG | 51 | 292 |
| 801954 | N/A | N/A | 4074 | 4089 | CCGGCCCCCGCACCCG | 67 | 293 |
| 801960 | N/A | N/A | 4665 | 4680 | GCCCAGGGCAACTCGG | 78 | 294 |
| 801966 | N/A | N/A | 5156 | 5171 | CCGGTTCCCACCTGTG | 56 | 295 |
| 801972 | N/A | N/A | 5662 | 5677 | ACACGGATGTCACCGG | 49 | 296 |
| 801978 | N/A | N/A | 6010 | 6025 | GCCCTGGTTGAGCCCA | 52 | 297 |
| 801984 | N/A | N/A | 6338 | 6353 | GCTGACACTTTTGGCA | 74 | 298 |
| 801990 | N/A | N/A | 6834 | 6849 | GCTGGCAGACCCGGCA | 87 | 299 |
| 801996 | N/A | N/A | 7249 | 7264 | GGGTGAGGCTTTGTGG | 77 | 300 |
| 802002 | N/A | N/A | 7743 | 7758 | GGGAGGACCTTGCTGC | 68 | 301 |
| 802008 | N/A | N/A | 8098 | 8113 | CCCATGTGGCCTACTG | 58 | 302 |
| 802014 | N/A | N/A | 8485 | 8500 | CCACACCCCAACTGGC | 75 | 303 |
| 802019 | N/A | N/A | 8996 | 9011 | GGCCACTGCTCCGTAG | 74 | 304 |
| 802025 | N/A | N/A | 9512 | 9527 | TCCCAGTGGCTGGTGC | 76 | 305 |
| 802031 | N/A | N/A | 10041 | 10056 | CTCCGTCCCCAAGGCA | 50 | 306 |
| 802037 | N/A | N/A | 10621 | 10636 | GCAGCACAGGCCTTAC | 56 | 307 |
| 802042 | N/A | N/A | 11105 | 11120 | TGCTGTGGGCCCACAT | 86 | 308 |
| 802048 | N/A | N/A | 11628 | 11643 | CCCTACTGGGACAGCA | 48 | 309 |
| 802054 | N/A | N/A | 12447 | 12462 | GACTGGAGAGGTGCGC | 73 | 310 |
| 802060 | N/A | N/A | 13158 | 13173 | TGCGCCATTTGGCGGA | 84 | 311 |
| 802066 | N/A | N/A | 14186 | 14201 | GGGACCCTAGGCTGGC | 68 | 312 |
| 802072 | N/A | N/A | 15430 | 15445 | CTCAATTCCCCCGTCC | 51 | 313 |
| 802078 | N/A | N/A | 16014 | 16029 | GGCTGCCCCCACTTAA | 71 | 314 |
| 802084 | N/A | N/A | 16412 | 16427 | ACCCCTCAAGGAACCA | 54 | 315 |
| 802090 | N/A | N/A | 17021 | 17036 | CAGCCATGCCACATCC | 106 | 316 |
| 802096 | N/A | N/A | 17659 | 17674 | GGCCACTGTGGACACG | 81 | 317 |
| 802102 | N/A | N/A | 18428 | 18443 | GGCCGCTGCAGGGCAA | 67 | 318 |
| 802108* | N/A | N/A | 18897 | 18912 | CAGGGCTGTCCCATGA | 96 | 319 |
| 802114* | N/A | N/A | 19282 | 19297 | AACCTCCCGGTACAGG | 70 | 320 |

TABLE 5
Reduction of SPDEF RNA by 4 μM 3-10-3 cEt gapmers
with a phosphorothioate backbone

| | SEQ | SEQ | SEQ | SEQ | | | |
|---|---|---|---|---|---|---|---|
| | ID | ID | ID | ID | | | |
| | NO: 1 | NO: 1 | NO: 2 | NO: 2 | | | |
| Compound | Start | Stop | Start | Stop | | SPDEF (% | SEQ |
| Number | Site | Site | Site | Site | Sequence (5′ to 3′) | UTC) | ID NO |
| 652504* | 1225 | 1240 | 18713 | 18728 | ATGAAGCGGCCATAGC | 113 | 321 |
| 652522 | 1362 | 1377 | 19647 | 19662 | TCTTGTAATACTGGCG | 60 | 16 |
| 791799 | 838 | 853 | 13949 | 13964 | AGCTTGCAGGCCGTCT | 82 | 322 |
| 791904 | 1363 | 1378 | 19648 | 19663 | TTCTTGTAATACTGGC | 53 | 323 |
| 801675 | 7 | 22 | 1674 | 1689 | GACAGCCGCGAGATGA | 74 | 324 |
| 801680 | 41 | 56 | 1708 | 1723 | CGGCAGAGTGCAGGAA | 63 | 325 |
| 801686 | 70 | 85 | 1737 | 1752 | AGGACTGGGTCTGTGG | 65 | 326 |
| 801692 | 118 | 133 | 1785 | 1800 | GGCAAGGCCCAACCTG | 85 | 327 |
| 801698 | 134 | 149 | 1801 | 1816 | TGCCTGCTGGCACCGT | 70 | 328 |
| 801704 | 237 | 252 | 1904 | 1919 | GCACTCAGGTTGGCCA | 89 | 329 |
| 801710 | 359 | 374 | 2026 | 2041 | TGCTGCAGTGCCAACT | 87 | 330 |
| 801716 | 410 | 425 | 13521 | 13536 | GTTTGGGCTGGCGGCT | 89 | 331 |
| 801722 | 443 | 458 | 13554 | 13569 | CAGACCCGGGCTGGCG | 63 | 332 |
| 801728 | 494 | 509 | 13605 | 13620 | CCGCGACACCGTGTCG | 58 | 333 |
| 801734 | 521 | 536 | 13632 | 13647 | CCCCGCTGCCGCCTTC | 61 | 334 |
| 801740 | 555 | 570 | 13666 | 13681 | TGGGACTCCAGTCCCG | 86 | 335 |
| 801746 | 593 | 608 | 13704 | 13719 | GAAGGCGGACAGGCCC | 96 | 336 |
| 801752 | 616 | 631 | 13727 | 13742 | AGCATGTCAAAGTAGG | 51 | 337 |
| 801758 | 671 | 686 | 13782 | 13797 | CTCCCGACTGCTGGCC | 78 | 338 |
| 801764 | 706 | 721 | 13817 | 13832 | ATGACCGGGCACTGCT | 61 | 339 |
| 801770 | 748 | 763 | 13859 | 13874 | CCGGGCACCAAGTCCA | 94 | 340 |
| 801776 | 776 | 791 | 13887 | 13902 | CAGCGAGTGCTCCTCC | 64 | 341 |
| 801782 | 797 | 812 | 13908 | 13923 | CACCATGGACTGCACC | 60 | 342 |
| 801788 | 819 | 834 | 13930 | 13945 | TGTCCTTGAGCACTTC | 58 | 343 |
| 801799 | 865 | 880 | N/A | N/A | TCCATGGGATCTGCGG | 80 | 344 |
| 801805 | 921 | 936 | 16870 | 16885 | GCCGGTATTGGTGCTC | 103 | 345 |
| 801811 | 983 | 998 | 16932 | 16947 | CTCCGACATGGCGCAC | 72 | 346 |
| 801817 | 1001 | 1016 | 16950 | 16965 | GCGCTGGCGGAACTGC | 82 | 347 |
| 801821 | 1075 | 1090 | 18445 | 18460 | GTCCGCTCTTTCATCC | 66 | 348 |
| 801827 | 1094 | 1109 | 18464 | 18479 | GTGAATCGCCCCAGGT | 66 | 349 |
| 801833 | 1113 | 1128 | N/A | N/A | CACTGGTCGAGGCACA | 102 | 350 |
| 801839 | 1145 | 1160 | 18633 | 18648 | TGAGTCCACCTCGCTG | 77 | 351 |
| 801845 | 1163 | 1178 | 18651 | 18666 | GGGCTGCCCGGAGCAT | 83 | 352 |
| 801851 | 1195 | 1210 | 18683 | 18698 | AGCAACTCCTTGAGGA | 58 | 353 |
| 801860* | 1257 | 1272 | N/A | N/A | TGAAGATGCCCTTCTC | 45 | 354 |
| 801866* | 1304 | 1319 | 19589 | 19604 | CTTGCGGATGCCCCAC | 42 | 355 |
| 801872* | 1322 | 1337 | 19607 | 19622 | GTTCATGGCGGGACGG | 16 | 356 |
| 801878* | 1348 | 1363 | 19633 | 19648 | CGGATGGAGCGGCTCA | 107 | 357 |
| 801883 | 1383 | 1398 | 19668 | 19683 | CTGGCTTCCGGATGAT | 81 | 358 |
| 801889 | 1416 | 1431 | 19701 | 19716 | GCACGAACTGGTAGAC | 55 | 359 |
| 801895 | 1524 | 1539 | 19809 | 19824 | GCAGACTGCCCGTTTT | 49 | 360 |
| 801901 | 1610 | 1625 | 19895 | 19910 | CCCGAAGGCCCCAGAG | 68 | 361 |
| 801907 | 1732 | 1747 | 20017 | 20032 | CTTCTGTAGGCTCTGC | 36 | 362 |
| 801913 | 1760 | 1775 | 20045 | 20060 | TGCCTGTGGCCTTTGT | 68 | 363 |
| 801919 | 1894 | 1909 | 20179 | 20194 | TCTCTAGTATCTTTAT | 51 | 364 |
| 801925 | N/A | N/A | 5755 | 5770 | CTCCCAGCTTGCCACA | 70 | 365 |
| 801931 | N/A | N/A | 2207 | 2222 | GGGATCCAGGTCACAG | 59 | 366 |
| 801937 | N/A | N/A | 2627 | 2642 | AGCGGTGACCCCAGCC | 57 | 367 |
| 801943 | N/A | N/A | 3146 | 3161 | GAGCAGCTGGTGATGG | 86 | 368 |
| 801949 | N/A | N/A | 3627 | 3642 | GTGCAGCCCTATTCCC | 106 | 369 |
| 801955 | N/A | N/A | 4125 | 4140 | TGCCCTCTAGGAGGAA | 78 | 370 |
| 801961 | N/A | N/A | 4778 | 4793 | CCCAACCCCGGCTGCT | 66 | 371 |
| 801967 | N/A | N/A | 5341 | 5356 | GCGCCCTGATCCTCAG | 83 | 372 |
| 801973 | N/A | N/A | 5729 | 5744 | CGTGAGGTTTCCTGGG | 51 | 373 |
| 801979 | N/A | N/A | 6060 | 6075 | CCGCTCAACCTTCAGG | 75 | 374 |
| 801985 | N/A | N/A | 6374 | 6389 | GGGCTCCCTTGTAAGC | 62 | 375 |
| 801991 | N/A | N/A | 6904 | 6919 | GGCACCTGTCCATGCG | 64 | 376 |
| 801997 | N/A | N/A | 7297 | 7312 | GCTAGTGGGCCCAGGA | 71 | 377 |
| 802003 | N/A | N/A | 7795 | 7810 | TCTTGCCCTGCTGTTC | 68 | 378 |
| 802009 | N/A | N/A | 8160 | 8175 | CCCCCAGCCGGCCTCA | 56 | 379 |
| 802015 | N/A | N/A | 8563 | 8578 | TGCCACTACCCTGCCT | 80 | 380 |
| 802020 | N/A | N/A | 9054 | 9069 | GAGGTGCCCACAGTCA | 61 | 381 |
| 802026 | N/A | N/A | 9650 | 9665 | CTGACTGGGCTCCTTG | 61 | 382 |
| 802032 | N/A | N/A | 10157 | 10172 | CCCCACCAAGCCTCGG | 35 | 383 |
| 802038 | N/A | N/A | 10724 | 10739 | GGCAGGTGGCAGCTTT | 53 | 384 |
| 802043 | N/A | N/A | 11249 | 11264 | CCCATTCAAGGGCTCC | 38 | 385 |
| 802049 | N/A | N/A | 11777 | 11792 | GGAGACTCCGCAGTCT | 66 | 386 |
| 802055 | N/A | N/A | 12531 | 12546 | CCCCACGGGCCGCCCC | 49 | 387 |
| 802061 | N/A | N/A | 13352 | 13367 | GGTTGGGCAGACAGGC | 51 | 388 |
| 802067 | N/A | N/A | 14279 | 14294 | GTGGCGGGAGCAGAGT | 77 | 389 |
| 802073 | N/A | N/A | 15564 | 15579 | GCCCTAGGAGGTCCCC | 81 | 390 |
| 802079 | N/A | N/A | 16052 | 16067 | GGTCCAGCCAGTGTCC | 75 | 391 |
| 802085 | N/A | N/A | 16489 | 16504 | CCTCAGCCCTAGAGGG | 98 | 392 |
| 802091 | N/A | N/A | 17089 | 17104 | GCCCTAGCAGAGGGCA | 99 | 393 |
| 802097 | N/A | N/A | 17999 | 18014 | GGCTGACACGCAGCCA | 92 | 394 |
| 802103 | N/A | N/A | 18514 | 18529 | CCCACCCGAGCCCCCG | 48 | 395 |
| 802109* | N/A | N/A | 18973 | 18988 | CTGTGCAGTACTAAAA | 61 | 396 |
| 802115* | N/A | N/A | 19319 | 19334 | GGCCCCAGTGAATGGC | 70 | 397 |

TABLE 3
Reduction of SPDEF RNA by 4 μM 3-10-3 cEt
gapmers with a phosphorothioate backbone

| | SEQ ID | SEQ ID | SEQ ID | SEQ ID | | | |
|---|---|---|---|---|---|---|---|
| | NO: 1 | NO: 1 | NO: 2 | NO: 2 | | | |
| Compound | Start | Stop | Start | Stop | | SPDEF | SEQ |
| Number | Site | Site | Site | Site | Sequence (5′ to 3′) | (% UTC) | ID NO |
| 652518* | 1350 | 1365 | 19635 | 19650 | GGCGGATGGAGCGGCT | 121 | 398 |
| 652522 | 1362 | 1377 | 19647 | 19662 | TCTTGTAATACTGGCG | 54 | 16 |
| 791907 | 1367 | 1382 | 19652 | 19667 | GCcCTTCTTGTAATAC | 93 | 399 |
| 801676 | 10 | 25 | 1677 | 1692 | TCAGACAGCCGCGAGA | 73 | 400 |
| 801681 | 43 | 58 | 1710 | 1725 | CACGGCAGAGTGCAGG | 81 | 401 |
| 801687 | 72 | 87 | 1739 | 1754 | GGAGGACTGGGTCTGT | 85 | 402 |
| 801693 | 120 | 135 | 1787 | 1802 | GTGGCAAGGCCCAACC | 82 | 403 |
| 801699 | 164 | 179 | 1831 | 1846 | GTAGGGAGTCCCCTAC | 76 | 404 |
| 801705 | 241 | 256 | 1908 | 1923 | GGCAGCACTCAGGTTG | 83 | 405 |
| 801711 | 388 | 403 | 2055 | 2070 | GTTAGCTGCCTGGTGC | 78 | 406 |
| 801717 | 413 | 428 | 13524 | 13539 | GCTGTTTGGGCTGGCG | 86 | 407 |
| 801723 | 448 | 463 | 13559 | 13574 | CTGCTCAGACCCGGGC | 60 | 408 |
| 801729 | 496 | 511 | 13607 | 13622 | GTCCGCGACACCGTGT | 69 | 409 |
| 801735 | 536 | 551 | 13647 | 13662 | CTCGAGACCCACTGCC | 71 | 410 |
| 801741 | 557 | 572 | 13668 | 13683 | ACTGGGACTCCAGTCC | 56 | 411 |
| 801747 | 595 | 610 | 13706 | 13721 | TAGAAGGCGGACAGGC | 79 | 412 |
| 801753 | 622 | 637 | 13733 | 13748 | GGGTACAGCATGTCAA | 92 | 413 |
| 801759 | 676 | 691 | 13787 | 13802 | GGCTCCTCCCGACTGC | 59 | 414 |
| 801765 | 710 | 725 | 13821 | 13836 | GTCAATGACCGGGCAC | 62 | 415 |
| 801771 | 751 | 766 | 13862 | 13877 | CCGCCGGGCACCAAGT | 90 | 416 |
| 801777 | 777 | 792 | 13888 | 13903 | CCAGCGAGTGCTCCTC | 53 | 417 |
| 801783 | 799 | 814 | 13910 | 13925 | ACCACCATGGACTGCA | 65 | 418 |
| 801789 | 824 | 839 | 13935 | 13950 | CTCGATGTCCTTGAGC | 84 | 419 |
| 801794 | 846 | 861 | 13957 | 13972 | TGTTGAGCAGCTTGCA | 87 | 420 |
| 801800 | 871 | 886 | 16820 | 16835 | CTCCAGTCCATGGGAT | 92 | 421 |
| 801806 | 923 | 938 | 16872 | 16887 | CAGCCGGTATTGGTGC | 83 | 422 |
| 801812 | 985 | 1000 | 16934 | 16949 | TCCTCCGACATGGCGC | 75 | 423 |
| 801818 | 1028 | 1043 | 16977 | 16992 | GTGCAGCACATCCCCA | 85 | 424 |
| 801822 | 1078 | 1093 | 18448 | 18463 | GAAGTCCGCTCTTTCA | 80 | 425 |
| 801828 | 1098 | 1113 | 18468 | 18483 | AGTAGTGAATCGCCCC | 51 | 426 |
| 801834 | 1116 | 1131 | 18604 | 18619 | CCTCACTGGTCGAGGC | 113 | 427 |
| 801840 | 1147 | 1162 | 18635 | 18650 | GATGAGTCCACCTCGC | 64 | 428 |
| 801846 | 1167 | 1182 | 18655 | 18670 | GGATGGGCTGCCCGGA | 64 | 429 |
| 801852 | 1199 | 1214 | 18687 | 18702 | GAGTAGCAACTCCTTG | 61 | 430 |
| 801855* | 1229 | 1244 | 18717 | 18732 | CCTAATGAAGCGGCCA | 91 | 431 |
| 801861* | 1261 | 1276 | N/A | N/A | ATTTTGAAGATGCCCT | 66 | 432 |
| 801867* | 1306 | 1321 | 19591 | 19606 | TTCTTGCGGATGCCCC | 27 | 433 |
| 801873* | 1326 | 1341 | 19611 | 19626 | CGTAGTTCATGGCGGG | 25 | 434 |
| 801884 | 1386 | 1401 | 19671 | 19686 | TGTCTGGCTTCCGGAT | 80 | 435 |
| 801890 | 1419 | 1434 | 19704 | 19719 | GGTGCACGAACTGGTA | 87 | 436 |
| 801896 | 1526 | 1541 | 19811 | 19826 | GAGCAGACTGCCCGTT | 58 | 437 |
| 801902 | 1614 | 1629 | 19899 | 19914 | GGGTCCCGAAGGCCCC | 72 | 438 |
| 801908 | 1735 | 1750 | 20020 | 20035 | GCCCTTCTGTAGGCTC | 76 | 439 |
| 801914 | 1766 | 1781 | 20051 | 20066 | CTGGACTGCCTGTGGC | 47 | 440 |
| 801920 | 1896 | 1911 | 20181 | 20196 | GTTCTCTAGTATCTTT | 50 | 441 |
| 801926 | N/A | N/A | 5128 | 5143 | AGACACATCCCCCTTT | 92 | 442 |
| 801932 | N/A | N/A | 2307 | 2322 | CCAGGCCTTGCCGGGC | 80 | 443 |
| 801938 | N/A | N/A | 2686 | 2701 | AGACCAGGACCCAAGG | 55 | 444 |
| 801944 | N/A | N/A | 3240 | 3255 | GGCCTGCCCGTCTGGT | 95 | 445 |
| 801950 | N/A | N/A | 3697 | 3712 | GTGGGTTCTCCCGGTT | 26 | 446 |
| 801956 | N/A | N/A | 4167 | 4182 | TCTAGCCCAGTCCAGG | 74 | 447 |
| 801962 | N/A | N/A | 4877 | 4892 | GTCCCATCCGACCCCC | 57 | 448 |
| 801968 | N/A | N/A | 5400 | 5415 | CCACACACCTGGTTGT | 87 | 449 |
| 801974 | N/A | N/A | 5773 | 5788 | GCCCCGCATACGCCGT | 42 | 450 |
| 801980 | N/A | N/A | 6143 | 6158 | GCCCAGACAAACCTGG | 113 | 451 |
| 801986 | N/A | N/A | 6483 | 6498 | TGTTAGCCCTGGCACT | 72 | 452 |
| 801992 | N/A | N/A | 6977 | 6992 | TGCCGGGCCCTCCCAG | 62 | 453 |
| 801998 | N/A | N/A | 7364 | 7379 | GGCCAACTGTCCCCCT | 66 | 454 |
| 802004 | N/A | N/A | 7871 | 7886 | GCCGCAGTAGCATGTC | 73 | 455 |
| 802010 | N/A | N/A | 8252 | 8267 | GCCCGCCCAGAGCCCA | 57 | 456 |
| 802016 | N/A | N/A | 8665 | 8680 | CACCTTGGGCCCCTTC | 89 | 457 |
| 802021 | N/A | N/A | 9118 | 9133 | CAGTGATGGTCCACCC | 44 | 458 |
| 802027 | N/A | N/A | 9698 | 9713 | GGTGCATGCTCTGGCC | 58 | 459 |
| 802033 | N/A | N/A | 10233 | 10248 | GCTCGGGCTCCTTCAC | 69 | 460 |
| 802039 | N/A | N/A | 10792 | 10807 | GGTAGGACAGGAGGCA | 69 | 461 |
| 802044 | N/A | N/A | 11346 | 11361 | TGCCCAACCTTCCCAG | 69 | 462 |
| 802050 | N/A | N/A | 11870 | 11885 | GCCGTCTGGGCCAGCA | 70 | 463 |
| 802056 | N/A | N/A | 12715 | 12730 | CGGCCACCCGGAGGCA | 90 | 464 |
| 802062 | N/A | N/A | 13451 | 13466 | GGGCCGCTAAGCTGGT | 65 | 465 |
| 802068 | N/A | N/A | 14411 | 14426 | GGCCTCATGCGGATGG | 76 | 466 |
| 802074 | N/A | N/A | 15643 | 15658 | ACTCAGCAGCCCCGCC | 64 | 467 |
| 802080 | N/A | N/A | 16100 | 16115 | GATAGGCTGGTGGGCA | 82 | 468 |
| 802086 | N/A | N/A | 16557 | 16572 | GCCCGCCTCACCCAGG | 62 | 469 |
| 802092 | N/A | N/A | 17167 | 17182 | GTGCACCAGGATCCAG | 71 | 470 |
| 802098 | N/A | N/A | 18131 | 18146 | GTCTCTGACAGGGTCC | 26 | 471 |
| 802104 | N/A | N/A | 18556 | 18571 | ATGGGAGGCCAGTCCC | 88 | 472 |
| 802110* | N/A | N/A | 19066 | 19081 | TTCTCAGGCAGTTCGG | 47 | 473 |
| 802116* | N/A | N/A | 19418 | 19433 | CCCCCTGCTCGGGTGG | 87 | 474 |

TABLE 7
Reduction of SPDEF RNA by 4 μM 3-10-3 cEt
gapmers with a phosphorothioate backbone

| | SEQ ID | SEQ ID | SEQ ID | SEQ ID | | | |
|---|---|---|---|---|---|---|---|
| | NO: 1 | NO: 1 | NO: 2 | NO: 2 | | | |
| Compound | Start | Stop | Start | Stop | | SPDEF | SEQ |
| Number | Site | Site | Site | Site | Sequence (5′ to 3′) | (% UTC) | ID NO |
| 791817 | 977 | 992 | 16926 | 16941 | CATGGCGCACAGCTCC | 77 | 475 |
| 801766 | 712 | 727 | 13823 | 13838 | CTGTCAATGACCGGGC | 49 | 33 |
| 802094 | N/A | N/A | 17292 | 17307 | CACGGTTGTCCCCAGC | 33 | 163 |
| 832823 | 1 | 16 | 1668 | 1683 | CGCGAGATGAAGAGTT | 86 | 476 |
| 832839 | 74 | 89 | 1741 | 1756 | TTGGAGGACTGGGTCT | 126 | 477 |
| 832855 | 163 | 178 | 1830 | 1845 | TAGGGAGTCCCCTACC | 91 | 478 |
| 832871 | 355 | 370 | 2022 | 2037 | GCAGTGCCAACTTCAG | 54 | 479 |
| 832887 | 409 | 424 | 13520 | 13535 | TTTGGGCTGGCGGCTG | 104 | 480 |
| 832903 | 449 | 464 | 13560 | 13575 | GCTGCTCAGACCCGGG | 79 | 481 |
| 832919 | 537 | 552 | 13648 | 13663 | TCTCGAGACCCACTGC | 90 | 482 |
| 832935 | 560 | 575 | 13671 | 13686 | TGGACTGGGACTCCAG | 96 | 483 |
| 832951 | 613 | 628 | 13724 | 13739 | ATGTCAAAGTAGGAGA | 82 | 484 |
| 832967 | 679 | 694 | 13790 | 13805 | GGTGGCTCCTCCCGAC | 54 | 485 |
| 832983 | 757 | 772 | 13868 | 13883 | GTCAGCCCGCCGGGCA | 91 | 486 |
| 832999 | 809 | 824 | 13920 | 13935 | CACTTCGCCCACCACC | 62 | 487 |
| 833015 | 832 | 847 | 13943 | 13958 | CAGGCCGTCTCGATGT | 66 | 488 |
| 833030 | 868 | 883 | 16817 | 16832 | CAGTCCATGGGATCTG | 87 | 489 |
| 833060 | 1029 | 1044 | 16978 | 16993 | CGTGCAGCACATCCCC | 60 | 490 |
| 833072 | 1079 | 1094 | 18449 | 18464 | TGAAGTCCGCTCTTTC | 81 | 491 |
| 833088 | 1104 | 1119 | N/A | N/A | AGGCACAGTAGTGAAT | 111 | 492 |
| 833104 | 1135 | 1150 | 18623 | 18638 | TCGCTGTCGGTCCAGC | 111 | 493 |
| 833120 | 1161 | 1176 | 18649 | 18664 | GCTGCCCGGAGCATGA | 72 | 494 |
| 833132* | 1224 | 1239 | 18712 | 18727 | TGAAGCGGCCATAGCT | 105 | 495 |
| 833146* | 1273 | 1288 | 19558 | 19573 | GCTGAGTCCTCAATTT | 73 | 496 |
| 833153 | 1389 | 1404 | 19674 | 19689 | AGATGTCTGGCTTCCG | 60 | 497 |
| 833169 | 1570 | 1585 | 19855 | 19870 | GGTTGCCCCTCCCTGA | 63 | 498 |
| 833185 | 1736 | 1751 | 20021 | 20036 | TGCCCTTCTGTAGGCT | 91 | 499 |
| 833201 | 1882 | 1897 | 20167 | 20182 | TTATTATCCATTCCCG | 40 | 500 |
| 833217 | N/A | N/A | 4997 | 5012 | GCGCTGGAGCCCCGGG | 101 | 501 |
| 833233 | N/A | N/A | 5024 | 5039 | TGGGCCTTGCCCCGCA | 92 | 502 |
| 833249 | N/A | N/A | 5081 | 5096 | AGGAGCTAGGTCCCAG | 67 | 503 |
| 833265 | N/A | N/A | 5162 | 5177 | TCAGGACCGGTTCCCA | 54 | 504 |
| 833281 | N/A | N/A | 5232 | 5247 | CTGACAGGCTAAGAAC | 87 | 505 |
| 833297 | N/A | N/A | 5292 | 5307 | TGTTAGGACAAAGTGA | 90 | 506 |
| 833313 | N/A | N/A | 5351 | 5366 | AAACATTCCTGCGCCC | 93 | 507 |
| 833329 | N/A | N/A | 5394 | 5409 | ACCTGGTTGTTGGTCT | 91 | 508 |
| 833345 | N/A | N/A | 5460 | 5475 | ATCTGCCGTGTTTCTG | 80 | 509 |
| 833361 | N/A | N/A | 5502 | 5517 | TCTCCCGAGAGGTGTG | 102 | 510 |
| 833377 | N/A | N/A | 5529 | 5544 | GGACAGCGATGTGAGA | 93 | 511 |
| 833393 | N/A | N/A | 5614 | 5629 | CGATCCTCTTGGCCTC | 89 | 512 |
| 833409 | N/A | N/A | 5631 | 5646 | GCCTGAGGCCCCTTGG | 97 | 513 |
| 833425 | N/A | N/A | 5666 | 5681 | GAACACACGGATGTCA | 101 | 514 |
| 833457 | N/A | N/A | 4854 | 4869 | TCACACTAAGGTCCCT | 72 | 515 |
| 833473 | N/A | N/A | 4879 | 4894 | CGGTCCCATCCGACCC | 95 | 516 |
| 833489 | N/A | N/A | 4909 | 4924 | TGGTGCGCCGTCATAA | 50 | 517 |
| 833505 | N/A | N/A | 18272 | 18287 | AAGCTGGTTACAAGAA | 94 | 518 |
| 833521 | N/A | N/A | 2230 | 2245 | GGGCAAGGAATTCTGA | 102 | 519 |
| 833537 | N/A | N/A | 2871 | 2886 | TACTTCCGCGCACACA | 111 | 520 |
| 833553 | N/A | N/A | 3376 | 3391 | CTCCGAGAATGCCCCC | 56 | 521 |
| 833569 | N/A | N/A | 3705 | 3720 | GGTAAAAAGTGGGTTC | 62 | 522 |
| 833585 | N/A | N/A | 3902 | 3917 | AGGAAAAGTGACCCGC | 113 | 523 |
| 833601 | N/A | N/A | 4435 | 4450 | GTCAAGAGTATGTCTT | 51 | 524 |
| 833617 | N/A | N/A | 5830 | 5845 | CGGTACACTCCTTGAA | 90 | 525 |
| 833633 | N/A | N/A | 6279 | 6294 | CTGAAAGACTCAGCCC | 75 | 526 |
| 833649 | N/A | N/A | 6705 | 6720 | CCGCAGCCTGGAGGTA | 86 | 527 |
| 833665 | N/A | N/A | 6985 | 7000 | AACTGCTTTGCCGGGC | 58 | 528 |
| 833681 | N/A | N/A | 7624 | 7639 | CGCTGGACAGACCCACC | 99 | 529 |
| 833697 | N/A | N/A | 8263 | 8278 | ACCCAATGCCAGCCCG | 66 | 530 |
| 833713 | N/A | N/A | 8589 | 8604 | AAGGAGAGATTTAGTG | 94 | 531 |
| 833729 | N/A | N/A | 9170 | 9185 | TCCTAGGCTCGCCTCA | 74 | 532 |
| 833745 | N/A | N/A | 9593 | 9608 | CCCCACTGTTCATATC | 108 | 533 |
| 833761 | N/A | N/A | 10154 | 10169 | CACCAAGCCTCGGTCC | 82 | 534 |
| 833776 | N/A | N/A | 11026 | 11041 | GCCCTACCCGCTAGGT | 75 | 535 |
| 833792 | N/A | N/A | 11478 | 11493 | CGGTAGGGCCACAGCT | 78 | 536 |
| 833808 | N/A | N/A | 11919 | 11934 | TCCTTTCTCGAGGGTT | 71 | 537 |
| 833824 | N/A | N/A | 12481 | 12496 | CAATAGCAGAGTGCAC | 70 | 538 |
| 833840 | N/A | N/A | 12888 | 12903 | CTCAACACTCTCAAGG | 87 | 539 |
| 833856 | N/A | N/A | 13154 | 13169 | CCATTTGGCGGATGAG | 86 | 540 |
| 833872 | N/A | N/A | 13447 | 13462 | CGCTAAGCTGGTTATG | 104 | 541 |
| 833888 | N/A | N/A | 14251 | 14266 | AGCGAAGTCCAAGAGG | 98 | 542 |
| 833904 | N/A | N/A | 14672 | 14687 | GGATTGATGAGCAAAA | 47 | 543 |
| 833920 | N/A | N/A | 15669 | 15684 | GGCGACAGCAGGACAG | 106 | 544 |
| 833936 | N/A | N/A | 16159 | 16174 | TCCTAGATGTCCCCCT | 63 | 545 |
| 833952 | N/A | N/A | 16629 | 16644 | GGCGAGAGGAAGGAAC | 91 | 546 |
| 833968 | N/A | N/A | 17599 | 17614 | TAATACTCTGCTACTA | 96 | 547 |
| 833984 | N/A | N/A | 18212 | 18227 | CCGTAAAGGGCTTGCA | 77 | 548 |
| 834000* | N/A | N/A | 19020 | 19035 | AATATGAGATGGTGGA | 84 | 549 |
| 834016* | N/A | N/A | 19358 | 19373 | CGGTGAGGTTAAAGAG | 100 | 550 |

TABLE 8
Reduction of SPDEF RNA by 4 μM 3-10-3 cEt
gapmers with a phosphorothioate backbone

| | SEQ ID | SEQ ID | SEQ ID | SEQ ID | | | |
|---|---|---|---|---|---|---|---|
| | NO: 1 | NO: 1 | NO: 2 | NO: 2 | | | |
| Compound | Start | Stop | Start | Stop | | SPDEF | SEQ |
| Number | Site | Site | Site | Site | Sequence (5′ to 3′) | (% UTC) | ID NO |
| 652464 | 978 | 993 | 16927 | 16942 | ACATGGCGCACAGCTC | 70 | 551 |
| 801766 | 712 | 727 | 13823 | 13838 | CTGTCAATGACCGGGC | 64 | 33 |
| 802094 | N/A | N/A | 17292 | 17307 | CACGGTTGTCCCCAGC | 34 | 163 |
| 832824 | 6 | 21 | 1673 | 1688 | ACAGCCGCGAGATGAA | 71 | 552 |
| 832840 | 114 | 129 | 1781 | 1796 | AGGCCCAACCTGAGGG | 108 | 553 |
| 832856 | 165 | 180 | 1832 | 1847 | TGTAGGGAGTCCCCTA | 77 | 554 |
| 832872 | 356 | 371 | 2023 | 2038 | TGCAGTGCCAACTTCA | 67 | 555 |
| 832888 | 411 | 426 | 13522 | 13537 | TGTTTGGGCTGGCGGC | 110 | 556 |
| 832904 | 451 | 466 | 13562 | 13577 | ACGCTGCTCAGACCCG | 46 | 557 |
| 832920 | 538 | 553 | 13649 | 13664 | CTCTCGAGACCCACTG | 75 | 558 |
| 832936 | 561 | 576 | 13672 | 13687 | GTGGACTGGGACTCCA | 95 | 559 |
| 832952 | 614 | 629 | 13725 | 13740 | CATGTCAAAGTAGGAG | 93 | 560 |
| 832968 | 704 | 719 | 13815 | 13830 | GACCGGGCACTGCTCA | 65 | 561 |
| 832984 | 759 | 774 | 13870 | 13885 | AGGTCAGCCCGCCGGG | 79 | 562 |
| 833000 | 810 | 825 | 13921 | 13936 | GCACTTCGCCCACCAC | 54 | 563 |
| 833016 | 834 | 849 | 13945 | 13960 | TGCAGGCCGTCTCGAT | 87 | 564 |
| 833031 | 869 | 884 | 16818 | 16833 | CCAGTCCATGGGATCT | 67 | 565 |
| 833061 | 1051 | 1066 | 17000 | 17015 | GACTTCCAGATGTCCA | 106 | 566 |
| 833073 | 1080 | 1095 | 18450 | 18465 | GTGAAGTCCGCTCTTT | 103 | 567 |
| 833089 | 1105 | 1120 | N/A | N/A | GAGGCACAGTAGTGAA | 116 | 568 |
| 833105 | 1136 | 1151 | 18624 | 18639 | CTCGCTGTCGGTCCAG | 81 | 569 |
| 833121 | 1162 | 1177 | 18650 | 18665 | GGCTGCCCGGAGCATG | 88 | 570 |
| 833133* | 1227 | 1242 | 18715 | 18730 | TAATGAAGCGGCCATA | 101 | 571 |
| 833147* | 1314 | 1329 | 19599 | 19614 | CGGGACGGTTCTTGCG | 4 | 572 |
| 833154 | 1391 | 1406 | 19676 | 19691 | GGAGATGTCTGGCTTC | 86 | 573 |
| 833170 | 1574 | 1589 | 19859 | 19874 | AGTTGGTTGCCCCTCC | 63 | 574 |
| 833186 | 1737 | 1752 | 20022 | 20037 | CTGCCCTTCTGTAGGC | 93 | 575 |
| 833202 | 1897 | 1912 | 20182 | 20197 | AGTTCTCTAGTATCTT | 40 | 576 |
| 833218 | N/A | N/A | 5009 | 5024 | AACCAGTCTCAGGCGC | 74 | 577 |
| 833234 | N/A | N/A | 5025 | 5040 | CTGGGCCTTGCCCCGC | 117 | 578 |
| 833250 | N/A | N/A | 5082 | 5097 | GAGGAGCTAGGTCCCA | 90 | 579 |
| 833266 | N/A | N/A | 5163 | 5178 | ATCAGGACCGGTTCCC | 51 | 580 |
| 833282 | N/A | N/A | 5235 | 5250 | GTCCTGACAGGCTAAG | 83 | 581 |
| 833298 | N/A | N/A | 5293 | 5308 | GTGTTAGGACAAAGTG | 78 | 582 |
| 833314 | N/A | N/A | 5352 | 5367 | AAAACATTCCTGCGCC | 82 | 583 |
| 833330 | N/A | N/A | 5395 | 5410 | CACCTGGTTGTTGGTC | 103 | 584 |
| 833346 | N/A | N/A | 5461 | 5476 | CATCTGCCGTGTTTCT | 66 | 585 |
| 833362 | N/A | N/A | 5504 | 5519 | TGTCTCCCGAGAGGTG | 88 | 586 |
| 833378 | N/A | N/A | 5530 | 5545 | AGGACAGCGATGTGAG | 87 | 587 |
| 833394 | N/A | N/A | 5615 | 5630 | CCGATCCTCTTGGCCT | 121 | 588 |
| 833410 | N/A | N/A | 5650 | 5665 | CCGGAGCTCTGCTGCT | 107 | 589 |
| 833426 | N/A | N/A | 5667 | 5682 | AGAACACACGGATGTC | 85 | 590 |
| 833458 | N/A | N/A | 4855 | 4870 | GTCACACTAAGGTCCC | 81 | 591 |
| 833474 | N/A | N/A | 4880 | 4895 | CCGGTCCCATCCGACC | 93 | 592 |
| 833490 | N/A | N/A | 4910 | 4925 | GTGGTGCGCCGTCATA | 49 | 593 |
| 833506 | N/A | N/A | 18273 | 18288 | CAAGCTGGTTACAAGA | 73 | 594 |
| 833522 | N/A | N/A | 2274 | 2289 | ATGTAGAGTTGGCCCA | 69 | 595 |
| 833538 | N/A | N/A | 2873 | 2888 | CATACTTCCGCGCACA | 115 | 596 |
| 833554 | N/A | N/A | 3421 | 3436 | ACGCAGTGAGACCACC | 65 | 597 |
| 833570 | N/A | N/A | 3709 | 3724 | CAGTGGTAAAAAGTGG | 76 | 598 |
| 833586 | N/A | N/A | 3916 | 3931 | TTGCAAGTACAGTGAG | 62 | 599 |
| 833602 | N/A | N/A | 4447 | 4462 | GTTAAATGGGCTGTCA | 87 | 600 |
| 833618 | N/A | N/A | 5833 | 5848 | CGCCGGTACACTCCTT | 61 | 601 |
| 833634 | N/A | N/A | 6355 | 6370 | GGCATACTCCATTTAC | 66 | 602 |
| 833650 | N/A | N/A | 6715 | 6730 | GCACAGGTGCCCGCAG | 90 | 603 |
| 833666 | N/A | N/A | 7034 | 7049 | GGCACTACTTCCAGCG | 87 | 604 |
| 833682 | N/A | N/A | 7627 | 7642 | GCCCGCTGGACAGACC | 87 | 605 |
| 833698 | N/A | N/A | 8275 | 8290 | CTCAATCCTGAGACCC | 61 | 606 |
| 833714 | N/A | N/A | 8673 | 8688 | GGATTAGCCACCTTGG | 64 | 607 |
| 833730 | N/A | N/A | 9193 | 9208 | CCTAATAGCTCCCTCC | 86 | 608 |
| 833746 | N/A | N/A | 9630 | 9645 | TCTAAAGTCTGTCCCC | 105 | 609 |
| 833762 | N/A | N/A | 10172 | 10187 | GCCAAGGAATCTACTC | 51 | 610 |
| 833777 | N/A | N/A | 11084 | 11099 | ACTCAGGCAGTGCCAA | 65 | 611 |
| 833793 | N/A | N/A | 11486 | 11501 | CTCCACTTCGGTAGGG | 85 | 612 |
| 833809 | N/A | N/A | 11942 | 11957 | TGTTAAGGGCAAGTTA | 82 | 613 |
| 833825 | N/A | N/A | 12483 | 12498 | ACCAATAGCAGAGTGC | 54 | 614 |
| 833841 | N/A | N/A | 12940 | 12955 | GAGTAGGCCAGCCCTT | 73 | 615 |
| 833857 | N/A | N/A | 13156 | 13171 | CGCCATTTGGCGGATG | 83 | 616 |
| 833873 | N/A | N/A | 13450 | 13465 | GGCCGCTAAGCTGGTT | 102 | 617 |
| 833889 | N/A | N/A | 14256 | 14271 | GGGAGAGCGAAGTCCA | 91 | 618 |
| 833905 | N/A | N/A | 14674 | 14689 | ATGGATTGATGAGCAA | 62 | 619 |
| 833921 | N/A | N/A | 15674 | 15689 | GGAGAGGCGACAGCAG | 89 | 620 |
| 833937 | N/A | N/A | 16166 | 16181 | GGCTAGGTCCTAGATG | 94 | 621 |
| 833953 | N/A | N/A | 16696 | 16711 | GGGATAGGTCAGCCCC | 73 | 622 |
| 833969 | N/A | N/A | 17602 | 17617 | GTGTAATACTCTGCTA | 79 | 623 |
| 833985 | N/A | N/A | 18214 | 18229 | GGCCGTAAAGGGCTTG | 87 | 624 |
| 834001* | N/A | N/A | 19061 | 19076 | AGGCAGTTCGGCCTGT | 109 | 625 |
| 834017* | N/A | N/A | 19373 | 19388 | CCCAAGGTGTAGTTGC | 89 | 626 |

TABLE 9
Reduction of SPDEF RNA by 4 μM 3-10-3 cEt
gapmers with a phosphorothioate backbone

| | SEQ ID | SEQ ID | SEQ ID | SEQ ID | | | |
|---|---|---|---|---|---|---|---|
| | NO: 1 | NO: 1 | NO: 2 | NO: 2 | | | |
| Compound | Start | Stop | Start | Stop | | SPDEF | SEQ |
| Number | Site | Site | Site | Site | Sequence (5′ to 3′) | (% UTC) | ID NO |
| 652495 | 1164 | 1179 | 18652 | 18667 | TGGGCTGCCCGGAGCA | 71 | 627 |
| 791897* | 1352 | 1367 | 19637 | 19652 | CTGGCGGATGGAGCGG | 84 | 628 |
| 801766 | 712 | 727 | 13823 | 13838 | CTGTCAATGACCGGGC | 52 | 33 |
| 802094 | N/A | N/A | 17292 | 17307 | CACGGTTGTCCCCAGC | 28 | 163 |
| 832825 | 8 | 23 | 1675 | 1690 | AGACAGCCGCGAGATG | 100 | 629 |
| 832841 | 116 | 131 | 1783 | 1798 | CAAGGCCCAACCTGAG | 82 | 630 |
| 832857 | 166 | 181 | 1833 | 1848 | CTGTAGGGAGTCCCCT | 86 | 631 |
| 832873 | 358 | 373 | 2025 | 2040 | GCTGCAGTGCCAACTT | 64 | 632 |
| 832889 | 412 | 427 | 13523 | 13538 | CTGTTTGGGCTGGCGG | 102 | 633 |
| 832905 | 452 | 467 | 13563 | 13578 | TACGCTGCTCAGACCC | 40 | 634 |
| 832921 | 539 | 554 | 13650 | 13665 | TCTCTCGAGACCCACT | 57 | 635 |
| 832937 | 568 | 583 | 13679 | 13694 | GTGGCGGGTGGACTGG | 75 | 636 |
| 832953 | 615 | 630 | 13726 | 13741 | GCATGTCAAAGTAGGA | 67 | 637 |
| 832969 | 705 | 720 | 13816 | 13831 | TGACCGGGCACTGCTC | 68 | 638 |
| 832985 | 760 | 775 | 13871 | 13886 | AAGGTCAGCCCGCCGG | 118 | 639 |
| 833001 | 811 | 826 | 13922 | 13937 | AGCACTTCGCCCACCA | 57 | 640 |
| 833017 | 835 | 850 | 13946 | 13961 | TTGCAGGCCGTCTCGA | 99 | 641 |
| 833032 | 870 | 885 | 16819 | 16834 | TCCAGTCCATGGGATC | 101 | 642 |
| 833046 | 979 | 994 | 16928 | 16943 | GACATGGCGCACAGCT | 76 | 643 |
| 833062 | 1053 | 1068 | 17002 | 17017 | CTGACTTCCAGATGTC | 125 | 644 |
| 833074 | 1082 | 1097 | 18452 | 18467 | AGGTGAAGTCCGCTCT | 95 | 645 |
| 833090 | 1107 | 1122 | N/A | N/A | TCGAGGCACAGTAGTG | 102 | 646 |
| 833106 | 1137 | 1152 | 18625 | 18640 | CCTCGCTGTCGGTCCA | 122 | 647 |
| 833134* | 1228 | 1243 | 18716 | 18731 | CTAATGAAGCGGCCAT | 77 | 648 |
| 833155 | 1392 | 1407 | 19677 | 19692 | GGGAGATGTCTGGCTT | 109 | 649 |
| 833171 | 1578 | 1593 | 19863 | 19878 | GGGCAGTTGGTTGCCC | 73 | 650 |
| 833187 | 1738 | 1753 | 20023 | 20038 | ACTGCCCTTCTGTAGG | 80 | 651 |
| 833203 | 1898 | 1913 | 20183 | 20198 | CAGTTCTCTAGTATCT | 64 | 652 |
| 833219 | N/A | N/A | 5010 | 5025 | CAACCAGTCTCAGGCG | 97 | 653 |
| 833235 | N/A | N/A | 5047 | 5062 | GCTACCCCAGGAGCAG | 82 | 654 |
| 833251 | N/A | N/A | 5083 | 5098 | GGAGGAGCTAGGTCCC | 120 | 655 |
| 833267 | N/A | N/A | 5164 | 5179 | TATCAGGACCGGTTCC | 83 | 656 |
| 833283 | N/A | N/A | 5236 | 5251 | TGTCCTGACAGGCTAA | 75 | 657 |
| 833299 | N/A | N/A | 5294 | 5309 | GGTGTTAGGACAAAGT | 80 | 658 |
| 833315 | N/A | N/A | 5353 | 5368 | AAAAACATTCCTGCGC | 89 | 659 |
| 833331 | N/A | N/A | 5396 | 5411 | ACACCTGGTTGTTGGT | 120 | 660 |
| 833347 | N/A | N/A | 5462 | 5477 | CCATCTGCCGTGTTTC | 86 | 661 |
| 833363 | N/A | N/A | 5505 | 5520 | CTGTCTCCCGAGAGGT | 81 | 662 |
| 833379 | N/A | N/A | 5531 | 5546 | CAGGACAGCGATGTGA | 83 | 663 |
| 833395 | N/A | N/A | 5616 | 5631 | GCCGATCCTCTTGGCC | 101 | 664 |
| 833411 | N/A | N/A | 5651 | 5666 | ACCGGAGCTCTGCTGC | 90 | 665 |
| 833427 | N/A | N/A | 5668 | 5683 | GAGAACACACGGATGT | 74 | 666 |
| 833459 | N/A | N/A | 4856 | 4871 | AGTCACACTAAGGTCC | 77 | 667 |
| 833475 | N/A | N/A | 4881 | 4896 | CCCGGTCCCATCCGAC | 89 | 668 |
| 833491 | N/A | N/A | 4911 | 4926 | GGTGGTGCGCCGTCAT | 49 | 669 |
| 833507 | N/A | N/A | 18274 | 18289 | GCAAGCTGGTTACAAG | 92 | 670 |
| 833523 | N/A | N/A | 2278 | 2293 | CAGCATGTAGAGTTGG | 95 | 671 |
| 833539 | N/A | N/A | 2876 | 2891 | ACACATACTTCCGCGC | 130 | 672 |
| 833555 | N/A | N/A | 3425 | 3440 | CCCTACGCAGTGAGAC | 71 | 673 |
| 833571 | N/A | N/A | 3718 | 3733 | CAACGACCTCAGTGGT | 63 | 674 |
| 833587 | N/A | N/A | 3925 | 3940 | GACAAGGTGTTGCAAG | 85 | 675 |
| 833603 | N/A | N/A | 4449 | 4464 | CTGTTAAATGGGCTGT | 60 | 676 |
| 833619 | N/A | N/A | 5836 | 5851 | AATCGCCGGTACACTC | 94 | 677 |
| 833635 | N/A | N/A | 6361 | 6376 | AGCAAAGGCATACTCC | 34 | 678 |
| 833651 | N/A | N/A | 6716 | 6731 | AGCACAGGTGCCCGCA | 74 | 679 |
| 833667 | N/A | N/A | 7041 | 7056 | CCTCACTGGCACTACT | 98 | 680 |
| 833683 | N/A | N/A | 7640 | 7655 | GAGCACCACTTCTGCC | 47 | 681 |
| 833699 | N/A | N/A | 8298 | 8313 | GGTAAATGTATCCTCA | 53 | 682 |
| 833715 | N/A | N/A | 8810 | 8825 | GGATTAAGGCTCAGCG | 48 | 683 |
| 833731 | N/A | N/A | 9276 | 9291 | GGGCACAACATGGCTA | 88 | 684 |
| 833747 | N/A | N/A | 9796 | 9811 | ATAGATGCGGACAGTG | 83 | 685 |
| 833763 | N/A | N/A | 10184 | 10199 | CTATACCTAAATGCCA | 106 | 686 |
| 833778 | N/A | N/A | 11087 | 11102 | TTTACTCAGGCAGTGC | 60 | 687 |
| 833794 | N/A | N/A | 11552 | 11567 | CTCCGTATGCAGCTGG | 76 | 688 |
| 833810 | N/A | N/A | 11949 | 11964 | ATAAACCTGTTAAGGG | 110 | 689 |
| 833826 | N/A | N/A | 12524 | 12539 | GGCCGCCCCGGCTTGG | 103 | 690 |
| 833842 | N/A | N/A | 12966 | 12981 | GGGTAGAAACCCTCCC | 113 | 691 |
| 833858 | N/A | N/A | 13227 | 13242 | ATGTACTGTGCTTAAA | 90 | 692 |
| 833874 | N/A | N/A | 13504 | 13519 | TGTCTACGGAAATGAA | 98 | 693 |
| 833890 | N/A | N/A | 14313 | 14328 | TAGCAAATGTTGTGGG | 95 | 694 |
| 833906 | N/A | N/A | 14694 | 14709 | TGCTATCCTAGCATCT | 93 | 695 |
| 833922 | N/A | N/A | 15678 | 15693 | AGCTGGAGAGGCGACA | 84 | 696 |
| 833938 | N/A | N/A | 16277 | 16292 | GGGCTAGACGCACAGG | 71 | 697 |
| 833954 | N/A | N/A | 16740 | 16755 | ACCCATGGGAACCTGT | 88 | 698 |
| 833970 | N/A | N/A | 17607 | 17622 | GAGCAGTGTAATACTC | 97 | 699 |
| 833986 | N/A | N/A | 18384 | 18399 | CCCCGAGGGTGGAGGA | 110 | 700 |
| 834002* | N/A | N/A | 19065 | 19080 | TCTCAGGCAGTTCGGC | 84 | 701 |
| 834018* | N/A | N/A | 19439 | 19454 | AGGGACCCCGTGCAGA | 125 | 702 |

TABLE 10
Reduction of SPDEF RNA by 4 μM 3-10-3 cEt
gapmers with a phosphorothioate backbone

| | SEQ ID | SEQ ID | SEQ ID | SEQ ID | | | |
|---|---|---|---|---|---|---|---|
| | NO: 1 | NO: 1 | NO: 2 | NO: 2 | | | |
| Compound | Start | Stop | Start | Stop | | SPDEF | SEQ |
| Number | Site | Site | Site | Site | Sequence (5′ to 3′) | (% UTC) | ID NO |
| 652444 | 837 | 852 | 13948 | 13963 | GCTTGCAGGCCGTCTC | 122 | 703 |
| 652478 | 1054 | 1069 | N/A | N/A | GCTGACTTCCAGATGT | 98 | 704 |
| 791870 | 1165 | 1180 | 18653 | 18668 | ATGGGCTGCCCGGAGC | 65 | 705 |
| 791898 | 1354 | 1369 | 19639 | 19654 | TACTGGCGGATGGAGC | 127 | 706 |
| 801766 | 712 | 727 | 13823 | 13838 | CTGTCAATGACCGGGC | 46 | 33 |
| 802094 | N/A | N/A | 17292 | 17307 | CACGGTTGTCCCCAGC | 29 | 163 |
| 832826 | 9 | 24 | 1676 | 1691 | CAGACAGCCGCGAGAT | 84 | 707 |
| 832842 | 117 | 132 | 1784 | 1799 | GCAAGGCCCAACCTGA | 91 | 708 |
| 832858 | 168 | 183 | 1835 | 1850 | GCCTGTAGGGAGTCCC | 110 | 709 |
| 832874 | 389 | 404 | 2056 | 2071 | TGTTAGCTGCCTGGTG | 113 | 710 |
| 832890 | 414 | 429 | 13525 | 13540 | TGCTGTTTGGGCTGGC | 86 | 711 |
| 832906 | 454 | 469 | 13565 | 13580 | GATACGCTGCTCAGAC | 61 | 712 |
| 832922 | 540 | 555 | 13651 | 13666 | GTCTCTCGAGACCCAC | 65 | 713 |
| 832938 | 583 | 598 | 13694 | 13709 | AGGCCCTGCTCGGGCG | 92 | 714 |
| 832954 | 620 | 635 | 13731 | 13746 | GTACAGCATGTCAAAG | 96 | 715 |
| 832970 | 707 | 722 | 13818 | 13833 | AATGACCGGGCACTGC | 67 | 716 |
| 832986 | 762 | 777 | 13873 | 13888 | CCAAGGTCAGCCCGCC | 72 | 717 |
| 833002 | 813 | 828 | 13924 | 13939 | TGAGCACTTCGCCCAC | 93 | 718 |
| 833033 | 888 | 903 | 16837 | 16852 | TCTGCACATTGCTGGG | 59 | 719 |
| 833047 | 980 | 995 | 16929 | 16944 | CGACATGGCGCACAGC | 66 | 720 |
| 833075 | 1084 | 1099 | 18454 | 18469 | CCAGGTGAAGTCCGCT | 83 | 721 |
| 833091 | 1108 | 1123 | N/A | N/A | GTCGAGGCACAGTAGT | 89 | 722 |
| 833107 | 1139 | 1154 | 18627 | 18642 | CACCTCGCTGTCGGTC | 89 | 723 |
| 833135* | 1230 | 1245 | 18718 | 18733 | ACCTAATGAAGCGGCC | 90 | 724 |
| 833156 | 1410 | 1425 | 19695 | 19710 | ACTGGTAGACGAGGCG | 66 | 725 |
| 833172 | 1594 | 1609 | 19879 | 19894 | GACCCATATCCCCCTG | 86 | 726 |
| 833188 | 1747 | 1762 | 20032 | 20047 | TGTCGAGTCACTGCCC | 48 | 727 |
| 833204 | 1899 | 1914 | 20184 | 20199 | TCAGTTCTCTAGTATC | 50 | 728 |
| 833220 | N/A | N/A | 5011 | 5026 | GCAACCAGTCTCAGGC | 66 | 729 |
| 833236 | N/A | N/A | 5048 | 5063 | TGCTACCCCAGGAGCA | 105 | 730 |
| 833252 | N/A | N/A | 5084 | 5099 | AGGAGGAGCTAGGTCC | 93 | 731 |
| 833268 | N/A | N/A | 5165 | 5180 | TTATCAGGACCGGTTC | 89 | 732 |
| 833284 | N/A | N/A | 5237 | 5252 | CTGTCCTGACAGGCTA | 70 | 733 |
| 833300 | N/A | N/A | 5295 | 5310 | GGGTGTTAGGACAAAG | 94 | 734 |
| 833316 | N/A | N/A | 5371 | 5386 | CTTGATGGGCTGAAGG | 117 | 735 |
| 833332 | N/A | N/A | 5397 | 5412 | CACACCTGGTTGTTGG | 113 | 736 |
| 833348 | N/A | N/A | 5463 | 5478 | TCCATCTGCCGTGTTT | 76 | 737 |
| 833364 | N/A | N/A | 5506 | 5521 | ACTGTCTCCCGAGAGG | 97 | 738 |
| 833380 | N/A | N/A | 5532 | 5547 | GCAGGACAGCGATGTG | 78 | 739 |
| 833396 | N/A | N/A | 5617 | 5632 | GGCCGATCCTCTTGGC | 101 | 740 |
| 833412 | N/A | N/A | 5652 | 5667 | CACCGGAGCTCTGCTG | 75 | 741 |
| 833428 | N/A | N/A | 5674 | 5689 | GGGCATGAGAACACAC | 89 | 742 |
| 833460 | N/A | N/A | 4857 | 4872 | GAGTCACACTAAGGTC | 73 | 743 |
| 833476 | N/A | N/A | 4882 | 4897 | TCCCGGTCCCATCCGA | 112 | 744 |
| 833492 | N/A | N/A | 4912 | 4927 | TGGTGGTGCGCCGTCA | 59 | 745 |
| 833508 | N/A | N/A | 18275 | 18290 | GGCAAGCTGGTTACAA | 104 | 746 |
| 833524 | N/A | N/A | 2359 | 2374 | TGCACGGCGGCCTCCC | 63 | 747 |
| 833540 | N/A | N/A | 2910 | 2925 | GCAACACGCACGCGCA | 120 | 748 |
| 833556 | N/A | N/A | 3445 | 3460 | CTCAAAGGCGAGGGTG | 98 | 749 |
| 833572 | N/A | N/A | 3722 | 3737 | CTCACAACGACCTCAG | 38 | 750 |
| 833588 | N/A | N/A | 3941 | 3956 | CTAACCTTGTTTCACA | 94 | 751 |
| 833604 | N/A | N/A | 4535 | 4550 | GAAAAGGTTTGATCCC | 94 | 752 |
| 833620 | N/A | N/A | 5839 | 5854 | CCAAATCGCCGGTACA | 89 | 753 |
| 833636 | N/A | N/A | 6393 | 6408 | ACGCAGAGGTGGACAC | 118 | 754 |
| 833652 | N/A | N/A | 6748 | 6763 | CCCCACAGCAGTTGCC | 101 | 755 |
| 833668 | N/A | N/A | 7072 | 7087 | CTGCATGGGCAGCCTG | 119 | 756 |
| 833684 | N/A | N/A | 7668 | 7683 | TTCCTTACGGCCCTCC | 85 | 757 |
| 833700 | N/A | N/A | 8356 | 8371 | CCATATCCTGCTTGGT | 76 | 758 |
| 833716 | N/A | N/A | 8812 | 8827 | CTGGATTAAGGCTCAG | 80 | 759 |
| 833732 | N/A | N/A | 9299 | 9314 | TTTCATACCTGCCCCT | 77 | 760 |
| 833748 | N/A | N/A | 9801 | 9816 | GCTTTATAGATGCGGA | 46 | 761 |
| 833764 | N/A | N/A | 10186 | 10201 | CCCTATACCTAAATGC | 94 | 762 |
| 833779 | N/A | N/A | 11089 | 11104 | TATTTACTCAGGCAGT | 90 | 763 |
| 833795 | N/A | N/A | 11560 | 11575 | CGCGCAGCCTCCGTAT | 89 | 764 |
| 833811 | N/A | N/A | 11951 | 11966 | AGATAAACCTGTTAAG | 111 | 765 |
| 833827 | N/A | N/A | 12555 | 12570 | ACACAAGCAGTCAGAG | 104 | 766 |
| 833843 | N/A | N/A | 12983 | 12998 | ACGAGAGGAACAAGGC | 68 | 767 |
| 833859 | N/A | N/A | 13232 | 13247 | CACACATGTACTGTGC | 117 | 768 |
| 833875 | N/A | N/A | 13506 | 13521 | TGTGTCTACGGAAATG | 106 | 769 |
| 833891 | N/A | N/A | 14395 | 14410 | TGCCATCTGAGCCAAG | 85 | 770 |
| 833907 | N/A | N/A | 14707 | 14722 | GTTATATTCAAGGTGC | 43 | 771 |
| 833923 | N/A | N/A | 15701 | 15716 | GGACATGGGTCAGGAC | 50 | 772 |
| 833939 | N/A | N/A | 16280 | 16295 | AAAGGGCTAGACGCAC | 41 | 773 |
| 833955 | N/A | N/A | 16770 | 16785 | CCTGAGAGCACCACCC | 126 | 774 |
| 833971 | N/A | N/A | 17611 | 17626 | TGCAGAGCAGTGTAAT | 104 | 775 |
| 833987 | N/A | N/A | 18472 | 18487 | CCACAGTAGTGAATCG | 91 | 776 |
| 834003* | N/A | N/A | 19118 | 19133 | CCCCATTACAGGTGTC | 68 | 777 |
| 834019* | N/A | N/A | 19442 | 19457 | CCAAGGGACCCCGTGC | 92 | 778 |

TABLE 11
Reduction of SPDEF RNA by 4 μM 3-10-3 cEt
gapmers with a phosphorothioate backbone

| | SEQ ID | SEQ ID | SEQ ID | SEQ ID | | | |
|---|---|---|---|---|---|---|---|
| | NO: 1 | NO: 1 | NO: 2 | NO: 2 | | | |
| Compound | Start | Stop | Start | Stop | | SPDEF | SEQ |
| Number | Site | Site | Site | Site | Sequence (5′ to 3′) | (% UTC) | ID NO |
| 652520 | 1356 | 1371 | 19641 | 19656 | AATACTGGCGGATGGA | 118 | 779 |
| 801766 | 712 | 727 | 13823 | 13838 | CTGTCAATGACCGGGC | 83 | 33 |
| 802094 | N/A | N/A | 17292 | 17307 | CACGGTTGTCCCCAGC | 54 | 163 |
| 832827 | 11 | 26 | 1678 | 1693 | GTCAGACAGCCGCGAG | 95 | 780 |
| 832843 | 119 | 134 | 1786 | 1801 | TGGCAAGGCCCAACCT | 105 | 781 |
| 832859 | 169 | 184 | 1836 | 1851 | TGCCTGTAGGGAGTCC | 133 | 782 |
| 832875 | 391 | 406 | N/A | N/A | TCTGTTAGCTGCCTGG | 101 | 783 |
| 832891 | 418 | 433 | 13529 | 13544 | CCGCTGCTGTTTGGGC | 117 | 784 |
| 832907 | 455 | 470 | 13566 | 13581 | GGATACGCTGCTCAGA | 92 | 785 |
| 832923 | 541 | 556 | 13652 | 13667 | CGTCTCTCGAGACCCA | 86 | 786 |
| 832939 | 585 | 600 | 13696 | 13711 | ACAGGCCCTGCTCGGG | 143 | 787 |
| 832955 | 625 | 640 | 13736 | 13751 | TCAGGGTACAGCATGT | 127 | 788 |
| 832971 | 708 | 723 | 13819 | 13834 | CAATGACCGGGCACTG | 125 | 789 |
| 832987 | 764 | 779 | 13875 | 13890 | CTCCAAGGTCAGCCCG | 99 | 790 |
| 833003 | 814 | 829 | 13925 | 13940 | TTGAGCACTTCGCCCA | 98 | 791 |
| 833018 | 839 | 854 | 13950 | 13965 | CAGCTTGCAGGCCGTC | 96 | 792 |
| 833034 | 915 | 930 | 16864 | 16879 | ATTGGTGCTCTGTCCA | 79 | 793 |
| 833048 | 981 | 996 | 16930 | 16945 | CCGACATGGCGCACAG | 100 | 794 |
| 833063 | 1055 | 1070 | N/A | N/A | CGCTGACTTCCAGATG | 117 | 795 |
| 833076 | 1086 | 1101 | 18456 | 18471 | CCCCAGGTGAAGTCCG | 130 | 796 |
| 833092 | 1110 | 1125 | N/A | N/A | TGGTCGAGGCACAGTA | 128 | 797 |
| 833108 | 1140 | 1155 | 18628 | 18643 | CCACCTCGCTGTCGGT | 95 | 798 |
| 833122 | 1166 | 1181 | 18654 | 18669 | GATGGGCTGCCCGGAG | 109 | 799 |
| 833136* | 1232 | 1247 | 18720 | 18735 | CCACCTAATGAAGCGG | 111 | 800 |
| 833157 | 1412 | 1427 | 19697 | 19712 | GAACTGGTAGACGAGG | 100 | 801 |
| 833173 | 1595 | 1610 | 19880 | 19895 | GGACCCATATCCCCCT | 119 | 802 |
| 833189 | 1748 | 1763 | 20033 | 20048 | TTGTCGAGTCACTGCC | 82 | 803 |
| 833221 | N/A | N/A | 5012 | 5027 | CGCAACCAGTCTCAGG | 83 | 804 |
| 833237 | N/A | N/A | 5049 | 5064 | TTGCTACCCCAGGAGC | 110 | 805 |
| 833253 | N/A | N/A | 5126 | 5141 | ACACATCCCCCTTTTG | 130 | 806 |
| 833269 | N/A | N/A | 5166 | 5181 | GTTATCAGGACCGGTT | 100 | 807 |
| 833285 | N/A | N/A | 5240 | 5255 | GAACTGTCCTGACAGG | 93 | 808 |
| 833301 | N/A | N/A | 5321 | 5336 | TGGAGCACACCTCCAG | 126 | 809 |
| 833317 | N/A | N/A | 5372 | 5387 | TCTTGATGGGCTGAAG | 109 | 810 |
| 833333 | N/A | N/A | 5398 | 5413 | ACACACCTGGTTGTTG | 90 | 811 |
| 833349 | N/A | N/A | 5466 | 5481 | GTCTCCATCTGCCGTG | 127 | 812 |
| 833365 | N/A | N/A | 5507 | 5522 | CACTGTCTCCCGAGAG | 114 | 813 |
| 833381 | N/A | N/A | 5533 | 5548 | GGCAGGACAGCGATGT | 127 | 814 |
| 833397 | N/A | N/A | 5618 | 5633 | TGGCCGATCCTCTTGG | 130 | 815 |
| 833413 | N/A | N/A | 5653 | 5668 | TCACCGGAGCTCTGCT | 77 | 816 |
| 833429 | N/A | N/A | 5675 | 5690 | AGGGCATGAGAACACA | 98 | 817 |
| 833445 | N/A | N/A | 4825 | 4840 | GGATGAGCCTCTCCCT | 123 | 818 |
| 833461 | N/A | N/A | 4858 | 4873 | AGAGTCACACTAAGGT | 102 | 819 |
| 833477 | N/A | N/A | 4883 | 4898 | GTCCCGGTCCCATCCG | 104 | 820 |
| 833493 | N/A | N/A | 4913 | 4928 | CTGGTGGTGCGCCGTC | 83 | 821 |
| 833509 | N/A | N/A | 18276 | 18291 | AGGCAAGCTGGTTACA | 127 | 822 |
| 833525 | N/A | N/A | 2366 | 2381 | CTGCATCTGCACGGCG | 86 | 823 |
| 833541 | N/A | N/A | 2912 | 2927 | ATGCAACACGCACGCG | 107 | 824 |
| 833557 | N/A | N/A | 3464 | 3479 | GTACATGCACTGTCAG | 95 | 825 |
| 833573 | N/A | N/A | 3726 | 3741 | TATACTCACAACGACC | 140 | 826 |
| 833589 | N/A | N/A | 3955 | 3970 | GGCAATAGCCTTGTCT | 92 | 827 |
| 833605 | N/A | N/A | 4612 | 4627 | TGACAGGCCACTCGCT | 93 | 828 |
| 833621 | N/A | N/A | 5841 | 5856 | CCCCAAATCGCCGGTA | 103 | 829 |
| 833637 | N/A | N/A | 6413 | 6428 | CTTAAAGAAGGATGGT | 107 | 830 |
| 833653 | N/A | N/A | 6808 | 6823 | CCTAAGGTTGCCCCTG | 88 | 831 |
| 833669 | N/A | N/A | 7107 | 7122 | ACACATTGCATCAGTG | 99 | 832 |
| 833685 | N/A | N/A | 7686 | 7701 | AGAGAAGTGCCAGACC | 91 | 833 |
| 833701 | N/A | N/A | 8389 | 8404 | ACCCAGGTCGCTGTGC | 118 | 834 |
| 833717 | N/A | N/A | 8828 | 8843 | GGATTAAGCCACATGT | 88 | 835 |
| 833733 | N/A | N/A | 9304 | 9319 | TGGCATTTCATACCTG | 72 | 836 |
| 833749 | N/A | N/A | 9855 | 9870 | CCACATCACCCGCTTT | 90 | 837 |
| 833765 | N/A | N/A | 10214 | 10229 | CTATACCCCACATTCC | 115 | 838 |
| 833780 | N/A | N/A | 11329 | 11344 | GTTACATGGCAGCCCT | 72 | 839 |
| 833796 | N/A | N/A | 11568 | 11583 | GACTGACCCGCGCAGC | 122 | 840 |
| 833812 | N/A | N/A | 11985 | 12000 | ATACAGAGAACCAGTT | 120 | 841 |
| 833828 | N/A | N/A | 12560 | 12575 | CCTCAACACAAGCAGT | 129 | 842 |
| 833844 | N/A | N/A | 12986 | 13001 | AAGACGAGAGGAACAA | 108 | 843 |
| 833860 | N/A | N/A | 13288 | 13303 | ATAGATCGCTCCCTCA | 81 | 844 |
| 833876 | N/A | N/A | 13996 | 14011 | TACGGAAGCAGGCACA | 136 | 845 |
| 833892 | N/A | N/A | 14403 | 14418 | GCGGATGGTGCCATCT | 95 | 846 |
| 833908 | N/A | N/A | 14715 | 14730 | GAGCATCAGTTATATT | 104 | 847 |
| 833924 | N/A | N/A | 15740 | 15755 | ACAGAGTTCAGTGCTG | 128 | 848 |
| 833940 | N/A | N/A | 16288 | 16303 | CACGGAATAAAGGGCT | 104 | 849 |
| 833956 | N/A | N/A | 17078 | 17093 | GGGCAACCTCCTAGCC | 137 | 850 |
| 833972 | N/A | N/A | 17624 | 17639 | ACATACTGTGGTGTGC | 111 | 851 |
| 833988 | N/A | N/A | 18477 | 18492 | GCTCACCACAGTAGTG | 112 | 852 |
| 834004* | N/A | N/A | 19135 | 19150 | TGGCAAGAGCATCCCT | 95 | 853 |
| 834020* | N/A | N/A | 19444 | 19459 | AACCAAGGGACCCCGT | 112 | 854 |

TABLE 12
Reduction of SPDEF RNA by 4 μM 3-10-3 cEt
gapmers with a phosphorothioate backbone

| | SEQ ID | SEQ ID | SEQ ID | SEQ ID | | | |
|---|---|---|---|---|---|---|---|
| | NO: 1 | NO: 1 | NO: 2 | NO: 2 | | | |
| Compound | Start | Stop | Start | Stop | | SPDEF | SEQ |
| Number | Site | Site | Site | Site | Sequence (5′ to 3′) | (% UTC) | ID NO |
| 791901 | 1358 | 1373 | 19643 | 19658 | GTAATACTGGCGGATG | 133 | 855 |
| 801766 | 712 | 727 | 13823 | 13838 | CTGTCAATGACCGGGC | 51 | 33 |
| 802094 | N/A | N/A | 17292 | 17307 | CACGGTTGTCCCCAGC | 32 | 163 |
| 832828 | 13 | 28 | 1680 | 1695 | AAGTCAGACAGCCGCG | 99 | 856 |
| 832844 | 121 | 136 | 1788 | 1803 | CGTGGCAAGGCCCAAC | 95 | 857 |
| 832860 | 170 | 185 | 1837 | 1852 | GTGCCTGTAGGGAGTC | 92 | 858 |
| 832876 | 392 | 407 | N/A | N/A | GTCTGTTAGCTGCCTG | 132 | 859 |
| 832892 | 419 | 434 | 13530 | 13545 | GCCGCTGCTGTTTGGG | 79 | 860 |
| 832908 | 493 | 508 | 13604 | 13619 | CGCGACACCGTGTCGG | 97 | 861 |
| 832924 | 543 | 558 | 13654 | 13669 | CCCGTCTCTCGAGACC | 74 | 862 |
| 832940 | 586 | 601 | 13697 | 13712 | GACAGGCCCTGCTCGG | 123 | 863 |
| 832956 | 626 | 641 | 13737 | 13752 | CTCAGGGTACAGCATG | 104 | 864 |
| 832972 | 709 | 724 | 13820 | 13835 | TCAATGACCGGGCACT | 121 | 865 |
| 832988 | 773 | 788 | 13884 | 13899 | CGAGTGCTCCTCCAAG | 46 | 866 |
| 833004 | 816 | 831 | 13927 | 13942 | CCTTGAGCACTTCGCC | 73 | 867 |
| 833019 | 840 | 855 | 13951 | 13966 | GCAGCTTGCAGGCCGT | 89 | 868 |
| 833035 | 917 | 932 | 16866 | 16881 | GTATTGGTGCTCTGTC | 78 | 869 |
| 833049 | 982 | 997 | 16931 | 16946 | TCCGACATGGCGCACA | 85 | 870 |
| 833064 | 1059 | 1074 | N/A | N/A | AGGCCGCTGACTTCCA | 123 | 871 |
| 833077 | 1088 | 1103 | 18458 | 18473 | CGCCCCAGGTGAAGTC | 117 | 872 |
| 833093 | 1111 | 1126 | N/A | N/A | CTGGTCGAGGCACAGT | 112 | 873 |
| 833109 | 1143 | 1158 | 18631 | 18646 | AGTCCACCTCGCTGTC | 75 | 874 |
| 833123 | 1169 | 1184 | 18657 | 18672 | GTGGATGGGCTGCCCG | 49 | 875 |
| 833137* | 1234 | 1249 | 18722 | 18737 | AGCCACCTAATGAAGC | 101 | 876 |
| 833158 | 1417 | 1432 | 19702 | 19717 | TGCACGAACTGGTAGA | 80 | 877 |
| 833174 | 1596 | 1611 | 19881 | 19896 | AGGACCCATATCCCCC | 75 | 878 |
| 833190 | 1749 | 1764 | 20034 | 20049 | TTTGTCGAGTCACTGC | 62 | 879 |
| 833222 | N/A | N/A | 5013 | 5028 | CCGCAACCAGTCTCAG | 95 | 880 |
| 833238 | N/A | N/A | 5050 | 5065 | CTTGCTACCCCAGGAG | 93 | 881 |
| 833254 | N/A | N/A | 5129 | 5144 | GAGACACATCCCCCTT | 83 | 882 |
| 833270 | N/A | N/A | 5167 | 5182 | GGTTATCAGGACCGGT | 55 | 883 |
| 833286 | N/A | N/A | 5241 | 5256 | AGAACTGTCCTGACAG | 85 | 884 |
| 833302 | N/A | N/A | 5322 | 5337 | CTGGAGCACACCCTCA | 124 | 885 |
| 833318 | N/A | N/A | 5373 | 5388 | ATCTTGATGGGCTGAA | 111 | 886 |
| 833334 | N/A | N/A | 5399 | 5414 | CACACACCTGGTTGTT | 134 | 887 |
| 833350 | N/A | N/A | 5467 | 5482 | TGTCTCCATCTGCCGT | 57 | 888 |
| 833366 | N/A | N/A | 5508 | 5523 | TCACTGTCTCCCGAGA | 57 | 889 |
| 833382 | N/A | N/A | 5534 | 5549 | AGGCAGGACAGCGATG | 103 | 890 |
| 833398 | N/A | N/A | 5619 | 5634 | TTGGCCGATCCTCTTG | 132 | 891 |
| 833414 | N/A | N/A | 5654 | 5669 | GTCACCGGAGCTCTGC | 62 | 892 |
| 833430 | N/A | N/A | 5676 | 5691 | GAGGGCATGAGAACAC | 105 | 893 |
| 833446 | N/A | N/A | 4826 | 4841 | AGGATGAGCCTCTCCC | 124 | 894 |
| 833462 | N/A | N/A | 4859 | 4874 | CAGAGTCACACTAAGG | 75 | 895 |
| 833478 | N/A | N/A | 4884 | 4899 | GGTCCCGGTCCCATCC | 77 | 896 |
| 833494 | N/A | N/A | 4914 | 4929 | CCTGGTGGTGCGCCGT | 82 | 897 |
| 833510 | N/A | N/A | 18277 | 18292 | GAGGCAAGCTGGTTAC | 112 | 898 |
| 833526 | N/A | N/A | 2427 | 2442 | CAGCAAGCCGCTTGTG | 103 | 899 |
| 833542 | N/A | N/A | 2914 | 2929 | ACATGCAACACGCACG | 94 | 900 |
| 833558 | N/A | N/A | 3469 | 3484 | TGCTTGTACATGCACT | 64 | 901 |
| 833574 | N/A | N/A | 3729 | 3744 | CTTTATACTCACAACG | 77 | 902 |
| 833590 | N/A | N/A | 3960 | 3975 | TAACAGGCAATAGCCT | 111 | 903 |
| 833606 | N/A | N/A | 4628 | 4643 | GAAGAGTTGTTCCACC | 74 | 904 |
| 833622 | N/A | N/A | 5892 | 5907 | ATGCAGCCCGGGTCAC | 125 | 905 |
| 833638 | N/A | N/A | 6457 | 6472 | TACGATCCATGACCCT | 69 | 906 |
| 833654 | N/A | N/A | 6831 | 6846 | GGCAGACCCGGCATCT | 99 | 907 |
| 833670 | N/A | N/A | 7109 | 7124 | GAACACATTGCATCAG | 71 | 908 |
| 833686 | N/A | N/A | 7690 | 7705 | CCCAAGAGAAGTGCCA | 94 | 909 |
| 833702 | N/A | N/A | 8396 | 8411 | GCTAAGGACCCAGGTC | 68 | 910 |
| 833718 | N/A | N/A | 8835 | 8850 | CTCTTCTGGATTAAGC | 108 | 911 |
| 833734 | N/A | N/A | 9323 | 9338 | ATCCAAGCTCTAATGA | 113 | 912 |
| 833750 | N/A | N/A | 9881 | 9896 | CACCAGTGCCACGCCC | 79 | 913 |
| 833766 | N/A | N/A | 10234 | 10249 | GGCTCGGGCTCCTTCA | 65 | 914 |
| 833781 | N/A | N/A | 11336 | 11351 | TCCCAGTGTTACATGG | 80 | 915 |
| 833797 | N/A | N/A | 11571 | 11586 | TGAGACTGACCCGCGC | 92 | 916 |
| 833813 | N/A | N/A | 12005 | 12020 | ACAGATATACGCTCCT | 42 | 917 |
| 833829 | N/A | N/A | 12562 | 12577 | GGCCTCAACACAAGCA | 92 | 918 |
| 833845 | N/A | N/A | 13011 | 13026 | GGCTATCATCTTCACC | 66 | 919 |
| 833861 | N/A | N/A | 13291 | 13306 | GAAATAGATCGCTCCC | 73 | 920 |
| 833877 | N/A | N/A | 13999 | 14014 | TCTTACGGAAGCAGGC | 90 | 921 |
| 833893 | N/A | N/A | 14409 | 14424 | CCTCATGCGGATGGTG | 102 | 922 |
| 833909 | N/A | N/A | 15375 | 15390 | CAGAGAGGTAGCTCAT | 75 | 923 |
| 833925 | N/A | N/A | 15775 | 15790 | ATGCATGAAGACCCCT | 103 | 924 |
| 833941 | N/A | N/A | 16291 | 16306 | CTCCACGGAATAAAGG | 125 | 925 |
| 833957 | N/A | N/A | 17083 | 17098 | GCAGAGGGCAACCTCC | 97 | 926 |
| 833973 | N/A | N/A | 17628 | 17643 | CAAGACATACTGTGGT | 49 | 927 |
| 833989 | N/A | N/A | 18497 | 18512 | CTCCACCCTGCCGCTG | 96 | 928 |
| 834005* | N/A | N/A | 19149 | 19164 | GCCCACGGCTCACTTG | 123 | 929 |
| 834021* | N/A | N/A | 19447 | 19462 | GCGAACCAAGGGACCC | 97 | 930 |

TABLE 13
Reduction of SPDEF RNA by 4 μM 3-10-3 cEt
gapmers with a phosphorothioate backbone

| | SEQ ID | SEQ ID | SEQ ID | SEQ ID | | | |
|---|---|---|---|---|---|---|---|
| | NO: 1 | NO: 1 | NO: 2 | NO: 2 | | | |
| Compound | Start | Stop | Start | Stop | | SPDEF | SEQ |
| Number | Site | Site | Site | Site | Sequence (5′ to 3′) | (% UTC) | ID NO |
| 652480 | 1060 | 1075 | N/A | N/A | CAGGCCGCTGACTTCC | 90 | 931 |
| 652521 | 1359 | 1374 | 19644 | 19659 | TGTAATACTGGCGGAT | 72 | 932 |
| 801766 | 712 | 727 | 13823 | 13838 | CTGTCAATGACCGGGC | 61 | 33 |
| 802094 | N/A | N/A | 17292 | 17307 | CACGGTTGTCCCCAGC | 25 | 163 |
| 832829 | 14 | 29 | 1681 | 1696 | GAAGTCAGACAGCCGC | 56 | 933 |
| 832845 | 122 | 137 | 1789 | 1804 | CCGTGGCAAGGCCCAA | 85 | 934 |
| 832861 | 196 | 211 | 1863 | 1878 | GTGGCCCTCTGAGGTC | 86 | 935 |
| 832877 | 394 | 409 | N/A | N/A | GTGTCTGTTAGCTGCC | 97 | 936 |
| 832893 | 421 | 436 | 13532 | 13547 | ATGCCGCTGCTGTTTG | 67 | 937 |
| 832909 | 495 | 510 | 13606 | 13621 | TCCGCGACACCGTGTC | 61 | 938 |
| 832925 | 544 | 559 | 13655 | 13670 | TCCCGTCTCTCGAGAC | 93 | 939 |
| 832941 | 587 | 602 | 13698 | 13713 | GGACAGGCCCTGCTCG | 97 | 940 |
| 832957 | 628 | 643 | 13739 | 13754 | TCCTCAGGGTACAGCA | 87 | 941 |
| 832973 | 711 | 726 | 13822 | 13837 | TGTCAATGACCGGGCA | 58 | 942 |
| 832989 | 774 | 789 | 13885 | 13900 | GCGAGTGCTCCTCCAA | 48 | 943 |
| 833005 | 818 | 833 | 13929 | 13944 | GTCCTTGAGCACTTCG | 82 | 944 |
| 833020 | 841 | 856 | 13952 | 13967 | AGCAGCTTGCAGGCCG | 71 | 945 |
| 833036 | 919 | 934 | 16868 | 16883 | CGGTATTGGTGCTCTG | 88 | 946 |
| 833050 | 984 | 999 | 16933 | 16948 | CCTCCGACATGGCGCA | 113 | 947 |
| 833078 | 1089 | 1104 | 18459 | 18474 | TCGCCCCAGGTGAAGT | 88 | 948 |
| 833094 | 1112 | 1127 | N/A | N/A | ACTGGTCGAGGCACAG | 103 | 949 |
| 833110 | 1146 | 1161 | 18634 | 18649 | ATGAGTCCACCTCGCT | 74 | 950 |
| 833124 | 1196 | 1211 | 18684 | 18699 | TAGCAACTCCTTGAGG | 62 | 951 |
| 833138* | 1235 | 1250 | 18723 | 18738 | GAGCCACCTAATGAAG | 57 | 952 |
| 833159 | 1418 | 1433 | 19703 | 19718 | GTGCACGAACTGGTAG | 104 | 953 |
| 833175 | 1598 | 1613 | 19883 | 19898 | AGAGGACCCATATCCC | 68 | 954 |
| 833191 | 1750 | 1765 | 20035 | 20050 | CTTTGTCGAGTCACTG | 68 | 955 |
| 833223 | N/A | N/A | 5014 | 5029 | CCCGCAACCAGTCTCA | 71 | 956 |
| 833239 | N/A | N/A | 5051 | 5066 | ACTTGCTACCCCAGGA | 55 | 957 |
| 833255 | N/A | N/A | 5130 | 5145 | AGAGACACATCCCCCT | 62 | 958 |
| 833271 | N/A | N/A | 5183 | 5198 | GAGTGGGTTATTAAGG | 83 | 959 |
| 833287 | N/A | N/A | 5275 | 5290 | GGACTCCAACATCACA | 60 | 960 |
| 833303 | N/A | N/A | 5340 | 5355 | CGCCCTGATCCTCAGG | 85 | 961 |
| 833319 | N/A | N/A | 5374 | 5389 | AATCTTGATGGGCTGA | 88 | 962 |
| 833335 | N/A | N/A | 5450 | 5465 | TTTCTGCGGCCCCTCC | 55 | 963 |
| 833351 | N/A | N/A | 5477 | 5492 | TGGTGACTGCTGTCTC | 74 | 964 |
| 833367 | N/A | N/A | 5509 | 5524 | TTCACTGTCTCCCGAG | 85 | 965 |
| 833383 | N/A | N/A | 5535 | 5550 | CAGGCAGGACAGCGAT | 85 | 966 |
| 833399 | N/A | N/A | 5620 | 5635 | CTTGGCCGATCCTCTT | 79 | 967 |
| 833415 | N/A | N/A | 5655 | 5670 | TGTCACCGGAGCTCTG | 78 | 968 |
| 833431 | N/A | N/A | 5677 | 5692 | TGAGGGCATGAGAACA | 100 | 969 |
| 833447 | N/A | N/A | 4827 | 4842 | AAGGATGAGCCTCTCC | 102 | 970 |
| 833463 | N/A | N/A | 4860 | 4875 | GCAGAGTCACACTAAG | 54 | 971 |
| 833479 | N/A | N/A | 4885 | 4900 | AGGTCCCGGTCCCATC | 56 | 972 |
| 833495 | N/A | N/A | 4915 | 4930 | TCCTGGTGGTGCGCCG | 81 | 973 |
| 833511 | N/A | N/A | 18278 | 18293 | GGAGGCAAGCTGGTTA | 85 | 974 |
| 833527 | N/A | N/A | 2512 | 2527 | CATCAAGCTCCAGCAA | 80 | 975 |
| 833543 | N/A | N/A | 2916 | 2931 | GCACATGCAACACGCA | 108 | 976 |
| 833559 | N/A | N/A | 3503 | 3518 | CTGGATACCCCCACGG | 74 | 977 |
| 833575 | N/A | N/A | 3746 | 3761 | GGTTTCAGGGCTATTC | 34 | 978 |
| 833591 | N/A | N/A | 3962 | 3977 | TTTAACAGGCAATAGC | 92 | 979 |
| 833607 | N/A | N/A | 4646 | 4661 | GTGCAAAGTTTGCTTT | 55 | 980 |
| 833623 | N/A | N/A | 5896 | 5911 | CATGATGCAGCCCGGG | 90 | 981 |
| 833639 | N/A | N/A | 6463 | 6478 | GGATTTTACGATCCAT | 97 | 982 |
| 833655 | N/A | N/A | 6832 | 6847 | TGGCAGACCCGGCATC | 86 | 983 |
| 833671 | N/A | N/A | 7111 | 7126 | AGGAACACATTGCATC | 99 | 984 |
| 833687 | N/A | N/A | 7701 | 7716 | AACTAGCTGGACCCAA | 71 | 985 |
| 833703 | N/A | N/A | 8425 | 8440 | CCGGGAATGGAGTCAC | 95 | 986 |
| 833719 | N/A | N/A | 8846 | 8861 | CTCGAGTTGATCTCTT | 60 | 987 |
| 833735 | N/A | N/A | 9346 | 9361 | AGGGATTGACATAGTG | 65 | 988 |
| 833751 | N/A | N/A | 9912 | 9927 | GAGAACGGCACTGTGA | 110 | 989 |
| 833767 | N/A | N/A | 10272 | 10287 | AGAGAGGTAAATCCCC | 48 | 990 |
| 833782 | N/A | N/A | 11392 | 11407 | AGCCTAGGTAGAATTT | 88 | 991 |
| 833798 | N/A | N/A | 11640 | 11655 | ACATTTATGGTGCCCT | 57 | 992 |
| 833814 | N/A | N/A | 12009 | 12024 | ACCAACAGATATACGC | 53 | 993 |
| 833830 | N/A | N/A | 12624 | 12639 | CCCTTAGCAACTCAGC | 57 | 994 |
| 833846 | N/A | N/A | 13020 | 13035 | CCTAAAGGTGGCTATC | 69 | 995 |
| 833862 | N/A | N/A | 13294 | 13309 | CTAGAAATAGATCGCT | 57 | 996 |
| 833878 | N/A | N/A | 14002 | 14017 | CCATCTTACGGAAGCA | 72 | 997 |
| 833894 | N/A | N/A | 14526 | 14541 | AGGTAGGGATGTGAGC | 73 | 998 |
| 833910 | N/A | N/A | 15387 | 15402 | TGCTTTTCGGCCCAGA | 33 | 999 |
| 833926 | N/A | N/A | 15779 | 15794 | AGGGATGCATGAAGAC | 98 | 1000 |
| 833942 | N/A | N/A | 16370 | 16385 | TTAGAACCCCACCATT | 82 | 1001 |
| 833958 | N/A | N/A | 17085 | 17100 | TAGCAGAGGGCAACCT | 78 | 1002 |
| 833974 | N/A | N/A | 17638 | 17653 | GGGCAATACCCAAGAC | 54 | 1003 |
| 833990 | N/A | N/A | 18538 | 18553 | CTTCATTGGCAGCCAC | 90 | 1004 |
| 834006* | N/A | N/A | 19183 | 19198 | ACCTAATGCAAAGTCC | 75 | 1005 |
| 834022* | N/A | N/A | 19473 | 19488 | ACGCAGACCACCAGGT | 122 | 1006 |

TABLE 14
Reduction of SPDEF RNA by 4 μM 3-10-3 cEt
gapmers with a phosphorothioate backbone

| | SEQ ID | SEQ ID | SEQ ID | SEQ ID | | | |
|---|---|---|---|---|---|---|---|
| | NO: 1 | NO: 1 | NO: 2 | NO: 2 | | | |
| Compound | Start | Stop | Start | Stop | | SPDEF | SEQ |
| Number | Site | Site | Site | Site | Sequence (5′ to 3′) | (% UTC) | ID NO |
| 791842 | 1061 | 1076 | N/A | N/A | CCAGGCCGCTGACTTC | 92 | 1007 |
| 791903 | 1361 | 1376 | 19646 | 19661 | CTTGTAATACTGGCGG | 87 | 1008 |
| 801766 | 712 | 727 | 13823 | 13838 | CTGTCAATGACCGGGC | 56 | 33 |
| 802095 | N/A | N/A | 17525 | 17540 | TTCATAGACTTTCCCT | 51 | 240 |
| 832830 | 44 | 59 | 1711 | 1726 | ACACGGCAGAGTGCAG | 103 | 1009 |
| 832846 | 123 | 138 | 1790 | 1805 | ACCGTGGCAAGGCCCA | 72 | 1010 |
| 832862 | 197 | 212 | 1864 | 1879 | GGTGGCCCTCTGAGGT | 113 | 1011 |
| 832878 | 397 | 412 | N/A | N/A | GCTGTGTCTGTTAGCT | 97 | 1012 |
| 832894 | 423 | 438 | 13534 | 13549 | CCATGCCGCTGCTGTT | 74 | 1013 |
| 832910 | 497 | 512 | 13608 | 13623 | TGTCCGCGACACCGTG | 86 | 1014 |
| 832926 | 546 | 561 | 13657 | 13672 | AGTCCCGTCTCTCGAG | 90 | 1015 |
| 832942 | 589 | 604 | 13700 | 13715 | GCGGACAGGCCCTGCT | 107 | 1016 |
| 832958 | 630 | 645 | 13741 | 13756 | TGTCCTCAGGGTACAG | 103 | 1017 |
| 832974 | 713 | 728 | 13824 | 13839 | GCTGTCAATGACCGGG | 67 | 1018 |
| 832990 | 775 | 790 | 13886 | 13901 | AGCGAGTGCTCCTCCA | 69 | 1019 |
| 833006 | 820 | 835 | 13931 | 13946 | ATGTCCTTGAGCACTT | 77 | 1020 |
| 833021 | 843 | 858 | 13954 | 13969 | TGAGCAGCTTGCAGGC | 70 | 1021 |
| 833037 | 920 | 935 | 16869 | 16884 | CCGGTATTGGTGCTCT | 104 | 1022 |
| 833051 | 986 | 1001 | 16935 | 16950 | CTCCTCCGACATGGCG | 100 | 1023 |
| 833079 | 1090 | 1105 | 18460 | 18475 | ATCGCCCCAGGTGAAG | 96 | 1024 |
| 833095 | 1114 | 1129 | N/A | N/A | TCACTGGTCGAGGCAC | 97 | 1025 |
| 833111 | 1148 | 1163 | 18636 | 18651 | TGATGAGTCCACCTCG | 80 | 1026 |
| 833125 | 1197 | 1212 | 18685 | 18700 | GTAGCAACTCCTTGAG | 69 | 1027 |
| 833139* | 1236 | 1251 | 18724 | 18739 | TGAGCCACCTAATGAA | 61 | 1028 |
| 833160 | 1453 | 1468 | 19738 | 19753 | CGGGTTTCAGGCCCTG | 85 | 1029 |
| 833176 | 1599 | 1614 | 19884 | 19899 | CAGAGGACCCATATCC | 82 | 1030 |
| 833192 | 1751 | 1766 | 20036 | 20051 | CCTTTGTCGAGTCACT | 68 | 1031 |
| 833224 | N/A | N/A | 5015 | 5030 | CCCCGCAACCAGTCTC | 86 | 1032 |
| 833240 | N/A | N/A | 5052 | 5067 | AACTTGCTACCCCAGG | 47 | 1033 |
| 833256 | N/A | N/A | 5144 | 5159 | TGTGAAGTGTCAGCAG | 89 | 1034 |
| 833272 | N/A | N/A | 5184 | 5199 | GGAGTGGGTTATTAAG | 90 | 1035 |
| 833288 | N/A | N/A | 5276 | 5291 | AGGACTCCAACATCAC | 62 | 1036 |
| 833304 | N/A | N/A | 5342 | 5357 | TGCGCCCTGATCCTCA | 75 | 1037 |
| 833320 | N/A | N/A | 5375 | 5390 | AAATCTTGATGGGCTG | 105 | 1038 |
| 833336 | N/A | N/A | 5451 | 5466 | GTTTCTGCGGCCCCTC | 54 | 1039 |
| 833352 | N/A | N/A | 5489 | 5504 | GTGTGTCCACAGTGGT | 65 | 1040 |
| 833368 | N/A | N/A | 5515 | 5530 | GAAGGCTTCACTGTCT | 86 | 1041 |
| 833384 | N/A | N/A | 5546 | 5561 | TTTGAAGTCACCAGGC | 88 | 1042 |
| 833400 | N/A | N/A | 5621 | 5636 | CCTTGGCCGATCCTCT | 78 | 1043 |
| 833416 | N/A | N/A | 5656 | 5671 | ATGTCACCGGAGCTCT | 58 | 1044 |
| 833432 | N/A | N/A | 5678 | 5693 | TTGAGGGCATGAGAAC | 112 | 1045 |
| 833448 | N/A | N/A | 4828 | 4843 | GAAGGATGAGCCTCTC | 82 | 1046 |
| 833464 | N/A | N/A | 4861 | 4876 | AGCAGAGTCACACTAA | 87 | 1047 |
| 833480 | N/A | N/A | 4886 | 4901 | GAGGTCCCGGTCCCAT | 74 | 1048 |
| 833496 | N/A | N/A | 4917 | 4932 | TATCCTGGTGGTGCGC | 81 | 1049 |
| 833512 | N/A | N/A | 18315 | 18330 | GGTTGCCCCTGTGGCT | 99 | 1050 |
| 833528 | N/A | N/A | 2530 | 2545 | TTAGACTTAGCCCTGA | 75 | 1051 |
| 833544 | N/A | N/A | 2918 | 2933 | ATGCACATGCAACACG | 94 | 1052 |
| 833560 | N/A | N/A | 3526 | 3541 | AGCAAGTCTGGTAGTT | 64 | 1053 |
| 833576 | N/A | N/A | 3752 | 3767 | TCTAACGGTTTCAGGG | 79 | 1054 |
| 833592 | N/A | N/A | 3965 | 3980 | TGCTTTAACAGGCAAT | 89 | 1055 |
| 833608 | N/A | N/A | 4660 | 4675 | GGGCAACTCGGCTTGT | 70 | 1056 |
| 833624 | N/A | N/A | 5904 | 5919 | CGCTTTGCCATGATGC | 92 | 1057 |
| 833640 | N/A | N/A | 6466 | 6481 | CCTGGATTTTACGATC | 79 | 1058 |
| 833656 | N/A | N/A | 6866 | 6881 | CAAGACTCGGCTCCAC | 66 | 1059 |
| 833672 | N/A | N/A | 7174 | 7189 | AGCCAAAGTGGAGCGC | 76 | 1060 |
| 833688 | N/A | N/A | 7703 | 7718 | CAAACTAGCTGGACCC | 80 | 1061 |
| 833704 | N/A | N/A | 8434 | 8449 | CCACAGTTTCCGGGAA | 88 | 1062 |
| 833720 | N/A | N/A | 8853 | 8868 | CCCAAACCTCGAGTTG | 67 | 1063 |
| 833736 | N/A | N/A | 9350 | 9365 | AACCAGGGATTGACAT | 91 | 1064 |
| 833752 | N/A | N/A | 9914 | 9929 | GAGAGAACGGCACTGT | 86 | 1065 |
| 833768 | N/A | N/A | 10303 | 10318 | CCCTACTTTGCTAATG | 101 | 1066 |
| 833783 | N/A | N/A | 11400 | 11415 | ACGAATGGAGCCTAGG | 72 | 1067 |
| 833799 | N/A | N/A | 11642 | 11657 | TGACATTTATGGTGCC | 59 | 1068 |
| 833815 | N/A | N/A | 12019 | 12034 | GCAGAAGATTACCAAC | 78 | 1069 |
| 833831 | N/A | N/A | 12632 | 12647 | ACCTAAAACCCTTAGC | 94 | 1070 |
| 833847 | N/A | N/A | 13026 | 13041 | CACCATCCTAAAGGTG | 83 | 1071 |
| 833863 | N/A | N/A | 13318 | 13333 | AGCGAGGTGGGAGTGG | 108 | 1072 |
| 833879 | N/A | N/A | 14004 | 14019 | ACCCATCTTACGGAAG | 72 | 1073 |
| 833895 | N/A | N/A | 14530 | 14545 | CAGCAGGTAGGGATGT | 96 | 1074 |
| 833911 | N/A | N/A | 15393 | 15408 | AGGAACTGCTTTTCGG | 46 | 1075 |
| 833927 | N/A | N/A | 15784 | 15799 | GCCTGAGGGATGCATG | 84 | 1076 |
| 833943 | N/A | N/A | 16372 | 16387 | TCTTAGAACCCCACCA | 100 | 1077 |
| 833959 | N/A | N/A | 17174 | 17189 | GTGAAGAGTGCACCAG | 74 | 1078 |
| 833975 | N/A | N/A | 17652 | 17667 | GTGGACACGGACAGGG | 64 | 1079 |
| 833991* | N/A | N/A | 18817 | 18832 | CCCCATGCACCGTGCC | 104 | 1080 |
| 834007* | N/A | N/A | 19254 | 19269 | CCTTAGTGGGTTCCCT | 94 | 1081 |
| 834023* | N/A | N/A | 19477 | 19492 | AAAGACGCAGACCACC | 98 | 1082 |

TABLE 15
Reduction of SPDEF RNA by 4 μM 3-10-3 cEt
gapmers with a phosphorothioate backbone

| | SEQ ID | SEQ ID | SEQ ID | SEQ ID | | | |
|---|---|---|---|---|---|---|---|
| | NO: 1 | NO: 1 | NO: 2 | NO: 2 | | | |
| Compound | Start | Stop | Start | Stop | | SPDEF | SEQ |
| Number | Site | Site | Site | Site | Sequence (5′ to 3′) | (% UTC) | ID NO |
| 791905 | 1364 | 1379 | 19649 | 19664 | CTTCTTGTAATACTGG | 85 | 1083 |
| 801766 | 712 | 727 | 13823 | 13838 | CTGTCAATGACCGGGC | 58 | 33 |
| 802095 | N/A | N/A | 17525 | 17540 | TTCATAGACTTTCCCT | 44 | 240 |
| 832831 | 45 | 60 | 1712 | 1727 | GACACGGCAGAGTGCA | 98 | 1084 |
| 832847 | 125 | 140 | 1792 | 1807 | GCACCGTGGCAAGGCC | 108 | 1085 |
| 832863 | 198 | 213 | 1865 | 1880 | GGGTGGCCCTCTGAGG | 99 | 1086 |
| 832879 | 399 | 414 | N/A | N/A | CGGCTGTGTCTGTTAG | 112 | 1087 |
| 832895 | 424 | 439 | 13535 | 13550 | CCCATGCCGCTGCTGT | 68 | 1088 |
| 832911 | 498 | 513 | 13609 | 13624 | CTGTCCGCGACACCGT | 56 | 1089 |
| 832927 | 547 | 562 | 13658 | 13673 | CAGTCCCGTCTCTCGA | 90 | 1090 |
| 832943 | 591 | 606 | 13702 | 13717 | AGGCGGACAGGCCCTG | 99 | 1091 |
| 832959 | 631 | 646 | 13742 | 13757 | CTGTCCTCAGGGTACA | 72 | 1092 |
| 832975 | 715 | 730 | 13826 | 13841 | TGGCTGTCAATGACCG | 89 | 1093 |
| 832991 | 778 | 793 | 13889 | 13904 | TCCAGCGAGTGCTCCT | 81 | 1094 |
| 833007 | 821 | 836 | 13932 | 13947 | GATGTCCTTGAGCACT | 101 | 1095 |
| 833022 | 844 | 859 | 13955 | 13970 | TTGAGCAGCTTGCAGG | 99 | 1096 |
| 833038 | 922 | 937 | 16871 | 16886 | AGCCGGTATTGGTGCT | 127 | 1097 |
| 833052 | 989 | 1004 | 16938 | 16953 | CTGCTCCTCCGACATG | 111 | 1098 |
| 833065 | 1062 | 1077 | N/A | N/A | TCCAGGCCGCTGACTT | 117 | 1099 |
| 833080 | 1091 | 1106 | 18461 | 18476 | AATCGCCCCAGGTGAA | 111 | 1100 |
| 833096 | 1115 | 1130 | N/A | N/A | CTCACTGGTCGAGGCA | 119 | 1101 |
| 833112 | 1149 | 1164 | 18637 | 18652 | ATGATGAGTCCACCTC | 79 | 1102 |
| 833126 | 1198 | 1213 | 18686 | 18701 | AGTAGCAACTCCTTGA | 76 | 1103 |
| 833140* | 1237 | 1252 | 18725 | 18740 | TTGAGCCACCTAATGA | 24* | 1104 |
| 833161 | 1454 | 1469 | 19739 | 19754 | GCGGGTTTCAGGCCCT | 114 | 1105 |
| 833177 | 1600 | 1615 | 19885 | 19900 | CCAGAGGACCCATATC | 109 | 1106 |
| 833193 | 1752 | 1767 | 20037 | 20052 | GCCTTTGTCGAGTCAC | 74 | 1107 |
| 833225 | N/A | N/A | 5016 | 5031 | GCCCCGCAACCAGTCT | 103 | 1108 |
| 833241 | N/A | N/A | 5053 | 5068 | CAACTTGCTACCCCAG | 60 | 1109 |
| 833257 | N/A | N/A | 5146 | 5161 | CCTGTGAAGTGTCAGC | 85 | 1110 |
| 833273 | N/A | N/A | 5203 | 5218 | AACAAGGTTGAGATGG | 75 | 1111 |
| 833289 | N/A | N/A | 5277 | 5292 | AAGGACTCCAACATCA | 100 | 1112 |
| 833305 | N/A | N/A | 5343 | 5358 | CTGCGCCCTGATCCTC | 75 | 1113 |
| 833321 | N/A | N/A | 5376 | 5391 | AAAATCTTGATGGGCT | 70 | 1114 |
| 833337 | N/A | N/A | 5452 | 5467 | TGTTTCTGCGGCCCCT | 76 | 1115 |
| 833353 | N/A | N/A | 5494 | 5509 | GAGGTGTGTGTCCACA | 64 | 1116 |
| 833369 | N/A | N/A | 5521 | 5536 | ATGTGAGAAGGCTTCA | 114 | 1117 |
| 833385 | N/A | N/A | 5577 | 5592 | GGGACTCATAAAGACA | 103 | 1118 |
| 833401 | N/A | N/A | 5622 | 5637 | CCCTTGGCCGATCCTC | 55 | 1119 |
| 833417 | N/A | N/A | 5657 | 5672 | GATGTCACCGGAGCTC | 78 | 1120 |
| 833433 | N/A | N/A | 5679 | 5694 | GTTGAGGGCATGAGAA | 143 | 1121 |
| 833449 | N/A | N/A | 4829 | 4844 | GGAAGGATGAGCCTCT | 120 | 1122 |
| 833465 | N/A | N/A | 4862 | 4877 | CAGCAGAGTCACACTA | 102 | 1123 |
| 833481 | N/A | N/A | 4887 | 4902 | GGAGGTCCCGGTCCCA | 96 | 1124 |
| 833497 | N/A | N/A | 4918 | 4933 | TTATCCTGGTGGTGCG | 114 | 1125 |
| 833513 | N/A | N/A | 18316 | 18331 | GGGTTGCCCCTGTGGC | 92 | 1126 |
| 833529 | N/A | N/A | 2533 | 2548 | GCCTTAGACTTAGCCC | 90 | 1127 |
| 833545 | N/A | N/A | 2983 | 2998 | GCTGATAGGTGAGGTG | 103 | 1128 |
| 833561 | N/A | N/A | 3531 | 3546 | CAATAAGCAAGTCTGG | 46 | 1129 |
| 833577 | N/A | N/A | 3754 | 3769 | GCTCTAACGGTTTCAG | 82 | 1130 |
| 833593 | N/A | N/A | 3974 | 3989 | CGTGAAGCCTGCTTTA | 117 | 1131 |
| 833609 | N/A | N/A | 4666 | 4681 | AGCCCAGGGCAACTCG | 56 | 1132 |
| 833625 | N/A | N/A | 5907 | 5922 | CCCCGCTTTGCCATGA | 106 | 1133 |
| 833641 | N/A | N/A | 6511 | 6526 | CTGTAGGCCAGGTCAT | 113 | 1134 |
| 833657 | N/A | N/A | 6868 | 6883 | CTCAAGACTCGGCTCC | 68 | 1135 |
| 833673 | N/A | N/A | 7298 | 7313 | AGCTAGTGGGCCCAGG | 92 | 1136 |
| 833689 | N/A | N/A | 7706 | 7721 | CTTCAAACTAGCTGGA | 93 | 1137 |
| 833705 | N/A | N/A | 8436 | 8451 | AACCACAGTTTCCGGG | 70 | 1138 |
| 833721 | N/A | N/A | 8873 | 8888 | CCTGAGCGATGCCTCC | 85 | 1139 |
| 833737 | N/A | N/A | 9354 | 9369 | CCAGAACCAGGGATTG | 74 | 1140 |
| 833753 | N/A | N/A | 9917 | 9932 | GAAGAGAGAACGGCAC | 80 | 1141 |
| 833769 | N/A | N/A | 10342 | 10357 | GGCACAAGCTACCTCA | 75 | 1142 |
| 833784 | N/A | N/A | 11406 | 11421 | AGCTTGACGAATGGAG | 108 | 1143 |
| 833800 | N/A | N/A | 11653 | 11668 | CTCTCTAACAGTGACA | 91 | 1144 |
| 833816 | N/A | N/A | 12371 | 12386 | ATACATCAAGACAGGC | 62 | 1145 |
| 833832 | N/A | N/A | 12636 | 12651 | GAACACCTAAAACCCT | 74 | 1146 |
| 833848 | N/A | N/A | 13055 | 13070 | GGATAGGAGTGGAAGT | 96 | 1147 |
| 833864 | N/A | N/A | 13324 | 13339 | AAAGACAGCGAGGTGG | 80 | 1148 |
| 833880 | N/A | N/A | 14026 | 14041 | AGCGACCTCAGCCTTG | 86 | 1149 |
| 833896 | N/A | N/A | 14567 | 14582 | GAGGAGTGTAAGTGCT | 83 | 1150 |
| 833912 | N/A | N/A | 15400 | 15415 | GCATATTAGGAACTGC | 77 | 1151 |
| 833928 | N/A | N/A | 15863 | 15878 | GCATTGGGAAACTTGG | 79 | 1152 |
| 833944 | N/A | N/A | 16469 | 16484 | TGACACTCTACCAGAA | 82 | 1153 |
| 833960 | N/A | N/A | 17297 | 17312 | GTATCCACGGTTGTCC | 78 | 1154 |
| 833976 | N/A | N/A | 17767 | 17782 | GAAACAGGGAAGTCGA | 78 | 1155 |
| 833992* | N/A | N/A | 18864 | 18879 | TCTAGGACAAAGGTGG | 102 | 1156 |
| 834008* | N/A | N/A | 19256 | 19271 | TACCTTAGTGGGTTCC | 88 | 1157 |
| 834024* | N/A | N/A | 19480 | 19495 | GAGAAAGACGCAGACC | 127 | 1158 |

TABLE 16
Reduction of SPDEF RNA by 4 μM 3-10-3 cEt
gapmers with a phosphorothioate backbone

| | SEQ ID | SEQ ID | SEQ ID | SEQ ID | | | |
|---|---|---|---|---|---|---|---|
| | NO: 1 | NO: 1 | NO: 2 | NO: 2 | | | |
| Compound | Start | Stop | Start | Stop | | SPDEF | SEQ |
| Number | Site | Site | Site | Site | Sequence (5′ to 3′) | (% UTC) | ID NO |
| 652523 | 1365 | 1380 | 19650 | 19665 | CCTTCTTGTAATACTG | 95 | 1159 |
| 801766 | 712 | 727 | 13823 | 13838 | CTGTCAATGACCGGGC | 63 | 33 |
| 802095 | N/A | N/A | 17525 | 17540 | TTCATAGACTTTCCCT | 50 | 240 |
| 832832 | 47 | 62 | 1714 | 1729 | TGGACACGGCAGAGTG | 73 | 1160 |
| 832848 | 127 | 142 | 1794 | 1809 | TGGCACCGTGGCAAGG | 83 | 1161 |
| 832864 | 212 | 227 | 1879 | 1894 | TGGCCACCCTCAAGGG | 100 | 1162 |
| 832880 | 400 | 415 | N/A | N/A | GCGGCTGTGTCTGTTA | 110 | 1163 |
| 832896 | 426 | 441 | 13537 | 13552 | TGCCCATGCCGCTGCT | 79 | 1164 |
| 832912 | 499 | 514 | 13610 | 13625 | CCTGTCCGCGACACCG | 89 | 1165 |
| 832928 | 548 | 563 | 13659 | 13674 | CCAGTCCCGTCTCTCG | 98 | 1166 |
| 832944 | 592 | 607 | 13703 | 13718 | AAGGCGGACAGGCCCT | 96 | 1167 |
| 832960 | 668 | 683 | 13779 | 13794 | CCGACTGCTGGCCCCA | 98 | 1168 |
| 832976 | 718 | 733 | 13829 | 13844 | GCTTGGCTGTCAATGA | 90 | 1169 |
| 832992 | 783 | 798 | 13894 | 13909 | CCTGCTCCAGCGAGTG | 109 | 1170 |
| 833008 | 822 | 837 | 13933 | 13948 | CGATGTCCTTGAGCAC | 72 | 1171 |
| 833023 | 845 | 860 | 13956 | 13971 | GTTGAGCAGCTTGCAG | 108 | 1172 |
| 833039 | 924 | 939 | 16873 | 16888 | GCAGCCGGTATTGGTG | 116 | 1173 |
| 833053 | 990 | 1005 | 16939 | 16954 | ACTGCTCCTCCGACAT | 113 | 1174 |
| 833066 | 1064 | 1079 | N/A | N/A | CATCCAGGCCGCTGAC | 111 | 1175 |
| 833081 | 1093 | 1108 | 18463 | 18478 | TGAATCGCCCCAGGTG | 85 | 1176 |
| 833097 | 1117 | 1132 | 18605 | 18620 | TCCTCACTGGTCGAGG | 92 | 1177 |
| 833113 | 1150 | 1165 | 18638 | 18653 | CATGATGAGTCCACCT | 132 | 1178 |
| 833127 | 1200 | 1215 | 18688 | 18703 | TGAGTAGCAACTCCTT | 117 | 1179 |
| 833141* | 1239 | 1254 | 18727 | 18742 | TGTTGAGCCACCTAAT | 76 | 1180 |
| 833162 | 1516 | 1531 | 19801 | 19816 | CCCGTTTTCCCCCATC | 87 | 1181 |
| 833178 | 1611 | 1626 | 19896 | 19911 | TCCCGAAGGCCCCAGA | 92 | 1182 |
| 833194 | 1754 | 1769 | 20039 | 20054 | TGGCCTTTGTCGAGTC | 86 | 1183 |
| 833210 | N/A | N/A | 18602 | 18617 | TCACTGGTCGAGGCTG | 141 | 1184 |
| 833226 | N/A | N/A | 5017 | 5032 | TGCCCCGCAACCAGTC | 89 | 1185 |
| 833242 | N/A | N/A | 5054 | 5069 | GCAACTTGCTACCCCA | 46 | 1186 |
| 833258 | N/A | N/A | 5147 | 5162 | ACCTGTGAAGTGTCAG | 87 | 1187 |
| 833274 | N/A | N/A | 5207 | 5222 | TTCAAACAAGGTTGAG | 95 | 1188 |
| 833290 | N/A | N/A | 5279 | 5294 | TGAAGGACTCCAACAT | 107 | 1189 |
| 833306 | N/A | N/A | 5344 | 5359 | CCTGCGCCCTGATCCT | 90 | 1190 |
| 833322 | N/A | N/A | 5377 | 5392 | TAAAATCTTGATGGGC | 98 | 1191 |
| 833338 | N/A | N/A | 5453 | 5468 | GTGTTTCTGCGGCCCC | 61 | 1192 |
| 833354 | N/A | N/A | 5495 | 5510 | AGAGGTGTGTGTCCAC | 67 | 1193 |
| 833370 | N/A | N/A | 5522 | 5537 | GATGTGAGAAGGCTTC | 69 | 1194 |
| 833386 | N/A | N/A | 5578 | 5593 | AGGGACTCATAAAGAC | 112 | 1195 |
| 833402 | N/A | N/A | 5623 | 5638 | CCCCTTGGCCGATCCT | 81 | 1196 |
| 833418 | N/A | N/A | 5658 | 5673 | GGATGTCACCGGAGCT | 76 | 1197 |
| 833434 | N/A | N/A | 5680 | 5695 | CGTTGAGGGCATGAGA | 133 | 1198 |
| 833450 | N/A | N/A | 4830 | 4845 | AGGAAGGATGAGCCTC | 99 | 1199 |
| 833466 | N/A | N/A | 4870 | 4885 | CCGACCCCCAGCAGAG | 109 | 1200 |
| 833482 | N/A | N/A | 4888 | 4903 | GGGAGGTCCCGGTCCC | 92 | 1201 |
| 833498 | N/A | N/A | 4919 | 4934 | TTTATCCTGGTGGTGC | 73 | 1202 |
| 833530 | N/A | N/A | 2548 | 2563 | CCCGAACTGGACCCGG | 103 | 1203 |
| 833546 | N/A | N/A | 3035 | 3050 | ACACAGGCTACGCGGG | 95 | 1204 |
| 833562 | N/A | N/A | 3584 | 3599 | TCGAATTCAGAGGGTC | 89 | 1205 |
| 833578 | N/A | N/A | 3783 | 3798 | GGCTGCAACAAGTCAT | 82 | 1206 |
| 833594 | N/A | N/A | 4028 | 4043 | TGGCAAATCCAACTCC | 105 | 1207 |
| 833610 | N/A | N/A | 4690 | 4705 | AGCTTGGCATTAAATG | 99 | 1208 |
| 833626 | N/A | N/A | 5913 | 5928 | GCACATCCCCGCTTTG | 90 | 1209 |
| 833642 | N/A | N/A | 6567 | 6582 | TCCATAGGAGAGACCC | 89 | 1210 |
| 833658 | N/A | N/A | 6870 | 6885 | AACTCAAGACTCGGCT | 72 | 1211 |
| 833674 | N/A | N/A | 7302 | 7317 | AGCCAGCTAGTGGGCC | 92 | 1212 |
| 833690 | N/A | N/A | 7870 | 7885 | CCGCAGTAGCATGTCT | 80 | 1213 |
| 833706 | N/A | N/A | 8439 | 8454 | CCGAACCACAGTTTCC | 68 | 1214 |
| 833722 | N/A | N/A | 8889 | 8904 | CCACGGGCTGCCGTCT | 83 | 1215 |
| 833738 | N/A | N/A | 9356 | 9371 | GACCAGAACCAGGGAT | 61 | 1216 |
| 833754 | N/A | N/A | 9919 | 9934 | AAGAAGAGAGAACGGC | 86 | 1217 |
| 833770 | N/A | N/A | 10619 | 10634 | AGCACAGGCCTTACTC | 117 | 1218 |
| 833785 | N/A | N/A | 11410 | 11425 | GCATAGCTTGACGAAT | 74 | 1219 |
| 833801 | N/A | N/A | 11705 | 11720 | TTAAAGGTAACTGGCC | 90 | 1220 |
| 833817 | N/A | N/A | 12373 | 12388 | GAATACATCAAGACAG | 79 | 1221 |
| 833833 | N/A | N/A | 12638 | 12653 | GGGAACACCTAAAACC | 96 | 1222 |
| 833849 | N/A | N/A | 13058 | 13073 | CAAGGATAGGAGTGGA | 38 | 1223 |
| 833865 | N/A | N/A | 13326 | 13341 | GGAAAGACAGCGAGGT | 81 | 1224 |
| 833881 | N/A | N/A | 14091 | 14106 | CCAAAGCTGCCCGAGG | 115 | 1225 |
| 833897 | N/A | N/A | 14571 | 14586 | GTCCGAGGAGTGTAAG | 95 | 1226 |
| 833913 | N/A | N/A | 15465 | 15480 | GCCCTACGAACACAGG | 90 | 1227 |
| 833929 | N/A | N/A | 15884 | 15899 | CCTGGAGTCGGCCTGG | 105 | 1228 |
| 833945 | N/A | N/A | 16499 | 16514 | TTCGAGGGAGCCTCAG | 89 | 1229 |
| 833961 | N/A | N/A | 17302 | 17317 | TCCTAGTATCCACGGT | 67 | 1230 |
| 833977 | N/A | N/A | 17996 | 18011 | TGACACGCAGCCATTA | 127 | 1231 |
| 833993* | N/A | N/A | 18874 | 18889 | ATATTTGGCATCTAGG | 120 | 1232 |
| 834009* | N/A | N/A | 19273 | 19288 | GTACAGGTGAGCCTGT | 96 | 1233 |
| 834025* | N/A | N/A | 19502 | 19517 | GTATGAGTGAGGTGGC | 115 | 1234 |

TABLE 17
Reduction of SPDEF RNA by 4 μM 3-10-3 cEt
gapmers with a phosphorothioate backbone

| | SEQ ID | SEQ ID | SEQ ID | SEQ ID | | | |
|---|---|---|---|---|---|---|---|
| | NO: 1 | NO: 1 | NO: 2 | NO: 2 | | | |
| Compound | Start | Stop | Start | Stop | | SPDEF | SEQ |
| Number | Site | Site | Site | Site | Sequence (5′ to 3′) | (% UTC) | ID NO |
| 652482 | 1066 | 1081 | 18436 | 18451 | TTCATCCAGGCCGCTG | 97 | 1235 |
| 791906 | 1366 | 1381 | 19651 | 19666 | CCCTTCTTGTAATACT | 87 | 1236 |
| 801766 | 712 | 727 | 13823 | 13838 | CTGTCAATGACCGGGC | 57 | 33 |
| 802095 | N/A | N/A | 17525 | 17540 | TTCATAGACTTTCCCT | 41 | 240 |
| 832833 | 49 | 64 | 1716 | 1731 | TGTGGACACGGCAGAG | 86 | 1237 |
| 832849 | 128 | 143 | 1795 | 1810 | CTGGCACCGTGGCAAG | 112 | 1238 |
| 832865 | 213 | 228 | 1880 | 1895 | CTGGCCACCCTCAAGG | 99 | 1239 |
| 832881 | 402 | 417 | N/A | N/A | TGGCGGCTGTGTCTGT | 15 | 1240 |
| 832897 | 427 | 442 | 13538 | 13553 | CTGCCCATGCCGCTGC | 77 | 1241 |
| 832913 | 501 | 516 | 13612 | 13627 | AGCCTGTCCGCGACAC | 70 | 1242 |
| 832929 | 549 | 564 | 13660 | 13675 | TCCAGTCCCGTCTCTC | 76 | 1243 |
| 832945 | 594 | 609 | 13705 | 13720 | AGAAGGCGGACAGGCC | 95 | 1244 |
| 832961 | 670 | 685 | 13781 | 13796 | TCCCGACTGCTGGCCC | 91 | 1245 |
| 832977 | 720 | 735 | 13831 | 13846 | GGGCTTGGCTGTCAAT | 83 | 1246 |
| 832993 | 785 | 800 | 13896 | 13911 | CACCTGCTCCAGCGAG | 74 | 1247 |
| 833009 | 823 | 838 | 13934 | 13949 | TCGATGTCCTTGAGCA | 77 | 1248 |
| 833024 | 855 | 870 | 13966 | 13981 | CTGCGGTGATGTTGAG | 100 | 1249 |
| 833040 | 925 | 940 | 16874 | 16889 | GGCAGCCGGTATTGGT | 94 | 1250 |
| 833054 | 992 | 1007 | 16941 | 16956 | GAACTGCTCCTCCGAC | 81 | 1251 |
| 833082 | 1095 | 1110 | 18465 | 18480 | AGTGAATCGCCCCAGG | 59 | 1252 |
| 833098 | 1118 | 1133 | 18606 | 18621 | CTCCTCACTGGTCGAG | 105 | 1253 |
| 833114 | 1152 | 1167 | 18640 | 18655 | AGCATGATGAGTCCAC | 75 | 1254 |
| 833128 | 1201 | 1216 | 18689 | 18704 | TTGAGTAGCAACTCCT | 73 | 1255 |
| 833142* | 1240 | 1255 | 18728 | 18743 | TTGTTGAGCCACCTAA | 98 | 1256 |
| 833163 | 1517 | 1532 | 19802 | 19817 | GCCCGTTTTCCCCCAT | 61 | 1257 |
| 833179 | 1612 | 1627 | 19897 | 19912 | GTCCCGAAGGCCCCAG | 88 | 1258 |
| 833195 | 1756 | 1771 | 20041 | 20056 | TGTGGCCTTTGTCGAG | 95 | 1259 |
| 833211 | N/A | N/A | 4922 | 4937 | GTCTTTATCCTGGTGG | 59 | 1260 |
| 833227 | N/A | N/A | 5018 | 5033 | TTGCCCCGCAACCAGT | 74 | 1261 |
| 833243 | N/A | N/A | 5055 | 5070 | AGCAACTTGCTACCCC | 48 | 1262 |
| 833259 | N/A | N/A | 5148 | 5163 | CACCTGTGAAGTGTCA | 100 | 1263 |
| 833275 | N/A | N/A | 5208 | 5223 | CTTCAAACAAGGTTGA | 80 | 1264 |
| 833291 | N/A | N/A | 5280 | 5295 | GTGAAGGACTCCAACA | 84 | 1265 |
| 833307 | N/A | N/A | 5345 | 5360 | TCCTGCGCCCTGATCC | 83 | 1266 |
| 833323 | N/A | N/A | 5384 | 5399 | TGGTCTGTAAAATCTT | 98 | 1267 |
| 833339 | N/A | N/A | 5454 | 5469 | CGTGTTTCTGCGGCCC | 69 | 1268 |
| 833355 | N/A | N/A | 5496 | 5511 | GAGAGGTGTGTGTCCA | 112 | 1269 |
| 833371 | N/A | N/A | 5523 | 5538 | CGATGTGAGAAGGCTT | 124 | 1270 |
| 833387 | N/A | N/A | 5579 | 5594 | CAGGGACTCATAAAGA | 118 | 1271 |
| 833403 | N/A | N/A | 5625 | 5640 | GGCCCCTTGGCCGATC | 80 | 1272 |
| 833419 | N/A | N/A | 5659 | 5674 | CGGATGTCACCGGAGC | 55 | 1273 |
| 833435 | N/A | N/A | 5716 | 5731 | GGGTCTCTTGCTCCCC | 101 | 1274 |
| 833451 | N/A | N/A | 4831 | 4846 | GAGGAAGGATGAGCCT | 100 | 1275 |
| 833467 | N/A | N/A | 4871 | 4886 | TCCGACCCCCAGCAGA | 74 | 1276 |
| 833483 | N/A | N/A | 4902 | 4917 | CCGTCATAATCCTGGG | 72 | 1277 |
| 833499 | N/A | N/A | 4920 | 4935 | CTTTATCCTGGTGGTG | 59 | 1278 |
| 833531 | N/A | N/A | 2631 | 2646 | GCTCAGCGGTGACCCC | 66 | 1279 |
| 833547 | N/A | N/A | 3047 | 3062 | CCATCATAAAGGACAC | 72 | 1280 |
| 833563 | N/A | N/A | 3589 | 3604 | CCCTATCGAATTCAGA | 115 | 1281 |
| 833579 | N/A | N/A | 3793 | 3808 | GTTATACTCAGGCTGC | 42 | 1282 |
| 833595 | N/A | N/A | 4040 | 4055 | CAGGAGACCGGCTGGC | 90 | 1283 |
| 833611 | N/A | N/A | 4755 | 4770 | GGGAGAGCAGAATCTG | 80 | 1284 |
| 833627 | N/A | N/A | 5915 | 5930 | CTGCACATCCCCGCTT | 113 | 1285 |
| 833643 | N/A | N/A | 6616 | 6631 | ACGAAGACCTCCACTT | 80 | 1286 |
| 833659 | N/A | N/A | 6874 | 6889 | CTCGAACTCAAGACTC | 61 | 1287 |
| 833675 | N/A | N/A | 7369 | 7384 | GTCCAGGCCAACTGTC | 73 | 1288 |
| 833691 | N/A | N/A | 7872 | 7887 | AGCCGCAGTAGCATGT | 86 | 1289 |
| 833707 | N/A | N/A | 8449 | 8464 | CTGACAGCTCCCGAAC | 81 | 1290 |
| 833723 | N/A | N/A | 8897 | 8912 | TGCCAGTCCCACGGGC | 94 | 1291 |
| 833739 | N/A | N/A | 9361 | 9376 | GTCCGGACCAGAACCA | 76 | 1292 |
| 833755 | N/A | N/A | 9969 | 9984 | GCCCAACCTGCAACTA | 77 | 1293 |
| 833771 | N/A | N/A | 10690 | 10705 | TGACACATCCTTGACA | 81 | 1294 |
| 833786 | N/A | N/A | 11412 | 11427 | TAGCATAGCTTGACGA | 82 | 1295 |
| 833802 | N/A | N/A | 11708 | 11723 | GCTTTAAAGGTAACTG | 68 | 1296 |
| 833818 | N/A | N/A | 12383 | 12398 | TGAGACTTAAGAATAC | 88 | 1297 |
| 833834 | N/A | N/A | 12708 | 12723 | CCGGAGGCAGTGCCAC | 90 | 1298 |
| 833850 | N/A | N/A | 13061 | 13076 | TGACAAGGATAGGAGT | 76 | 1299 |
| 833866 | N/A | N/A | 13344 | 13359 | AGACAGGCCTTCTGGC | 71 | 1300 |
| 833882 | N/A | N/A | 14111 | 14126 | GTGTAGAAGTGCCAGC | 56 | 1301 |
| 833898 | N/A | N/A | 14588 | 14603 | CAGATATGGTGCGGCA | 75 | 1302 |
| 833914 | N/A | N/A | 15470 | 15485 | TGTCAGCCCTACGAAC | 108 | 1303 |
| 833930 | N/A | N/A | 16005 | 16020 | CACTTAATAAGCCCAT | 85 | 1304 |
| 833946 | N/A | N/A | 16503 | 16518 | ACCTTTCGAGGGAGCC | 78 | 1305 |
| 833962 | N/A | N/A | 17419 | 17434 | TGGTACACTACTTTTC | 55 | 1306 |
| 833978 | N/A | N/A | 18014 | 18029 | ATTTAGACACTCAGGG | 69 | 1307 |
| 833994* | N/A | N/A | 18918 | 18933 | ACACAGATTGCACACA | 93 | 1308 |
| 834010* | N/A | N/A | 19275 | 19290 | CGGTACAGGTGAGCCT | 91 | 1309 |
| 834026* | N/A | N/A | 19510 | 19525 | AGCCAGTGGTATGAGT | 97 | 1310 |

TABLE 18
Reduction of SPDEF RNA by 4 μM 3-10-3 cEt
gapmers with a phosphorothioate backbone

| | SEQ | SEQ | SEQ | SEQ | | | |
|---|---|---|---|---|---|---|---|
| | ID | ID | ID | ID | | | |
| | NO: | NO: | NO: | NO: | | | |
| Com- | 1 | 1 | 2 | 2 | | SPDEF | SEQ |
| pound | Start | Stop | Start | Stop | Sequence | (% | ID |
| Number | Site | Site | Site | Site | (5′ to 3′) | UTC) | NO |
| 801766 | 712 | 727 | 13823 | 13838 | CTGTCAATGA | 56 | 33 |
| | | | | | CCGGGC | | |
| 802095 | N/A | N/A | 17525 | 17540 | TTCATAGACT | 47 | 240 |
| | | | | | TTCCCT | | |
| 832834 | 50 | 65 | 1717 | 1732 | GTGTGGACAC | 80 | 1311 |
| | | | | | GGCAGA | | |
| 832850 | 129 | 144 | 1796 | 1811 | GCTGGCACCG | 105 | 1312 |
| | | | | | TGGCAA | | |
| 832866 | 236 | 251 | 1903 | 1918 | CACTCAGGTT | 86 | 1313 |
| | | | | | GGCCAC | | |
| 832882 | 403 | 418 | N/A | N/A | CTGGCGGCTG | 97 | 1314 |
| | | | | | TGTCTG | | |
| 832898 | 442 | 457 | 13553 | 13568 | AGACCCGGGC | 87 | 1315 |
| | | | | | TGGCGC | | |
| 832914 | 503 | 518 | 13614 | 13629 | CAAGCCTGTC | 57 | 1316 |
| | | | | | CGCGAC | | |
| 832930 | 551 | 566 | 13662 | 13677 | ACTCCAGTCC | 107 | 1317 |
| | | | | | CGTCTC | | |
| 832946 | 596 | 611 | 13707 | 13722 | GTAGAAGGCG | 80 | 1318 |
| | | | | | GACAGG | | |
| 832962 | 672 | 687 | 13783 | 13798 | CCTCCCGACT | 80 | 1319 |
| | | | | | GCTGGC | | |
| 832978 | 750 | 765 | 13861 | 13876 | CGCCGGGCAC | 100 | 1320 |
| | | | | | CAAGTC | | |
| 832994 | 793 | 808 | 13904 | 13919 | ATGGACTGCA | 65 | 1321 |
| | | | | | CCTGCT | | |
| 833010 | 825 | 840 | 13936 | 13951 | TCTCGATGTC | 122 | 1322 |
| | | | | | CTTGAG | | |
| 833025 | 856 | 871 | N/A | N/A | TCTGCGGTGA | 69 | 1323 |
| | | | | | TGTTGA | | |
| 833041 | 942 | 957 | 16891 | 16906 | AGGCCTTGCC | 16 | 1324 |
| | | | | | CATGGG | | |
| 833055 | 993 | 1008 | 16942 | 16957 | GGAACTGCTC | 65 | 1325 |
| | | | | | CTCCGA | | |
| 833067 | 1067 | 1082 | 18437 | 18452 | TTTCATCCAG | 94 | 1326 |
| | | | | | GCCGCT | | |
| 833083 | 1096 | 1111 | 18466 | 18481 | TAGTGAATCG | 72 | 1327 |
| | | | | | CCCCAG | | |
| 833099 | 1119 | 1134 | 18607 | 18622 | TCTCCTCACT | 89 | 1328 |
| | | | | | GGTCGA | | |
| 833115 | 1153 | 1168 | 18641 | 18656 | GAGCATGATG | 84 | 1329 |
| | | | | | AGTCCA | | |
| 833129 | 1203 | 1218 | 18691 | 18706 | GCTTGAGTAG | 96 | 1330 |
| | | | | | CAACTC | | |
| 833143* | 1241 | 1256 | 18729 | 18744 | CTTGTTGAGC | 30 | 1331 |
| | | | | | CACCTA | | |
| 833148 | 1382 | 1397 | 19667 | 19682 | TGGCTTCCGG | 111 | 1332 |
| | | | | | ATGATG | | |
| 833164 | 1519 | 1534 | 19804 | 19819 | CTGCCCGTTT | 57 | 1333 |
| | | | | | TCCCCC | | |
| 833180 | 1613 | 1628 | 19898 | 19913 | GGTCCCGAAG | 88 | 1334 |
| | | | | | GCCCCA | | |
| 833196 | 1757 | 1772 | 20042 | 20057 | CTGTGGCCTT | 80 | 1335 |
| | | | | | TGTCGA | | |
| 833212 | N/A | N/A | 4924 | 4939 | GGGTCTTTAT | 68 | 1336 |
| | | | | | CCTGGT | | |
| 833228 | N/A | N/A | 5019 | 5034 | CTTGCCCCGC | 56 | 1337 |
| | | | | | AACCAG | | |
| 833244 | N/A | N/A | 5056 | 5071 | AAGCAACTTG | 67 | 1338 |
| | | | | | CTACCC | | |
| 833260 | N/A | N/A | 5157 | 5172 | ACCGGTTCCC | 90 | 1339 |
| | | | | | ACCTGT | | |
| 833276 | N/A | N/A | 5209 | 5224 | GCTTCAAACA | 47 | 1340 |
| | | | | | AGGTTG | | |
| 833292 | N/A | N/A | 5281 | 5296 | AGTGAAGGAC | 106 | 1341 |
| | | | | | TCCAAC | | |
| 833308 | N/A | N/A | 5346 | 5361 | TTCCTGCGCC | 70 | 1342 |
| | | | | | CTGATC | | |
| 833324 | N/A | N/A | 5389 | 5404 | GTTGTTGGTC | 115 | 1343 |
| | | | | | TGTAAA | | |
| 833340 | N/A | N/A | 5455 | 5470 | CCGTGTTTCT | 52 | 1344 |
| | | | | | GCGGCC | | |
| 833356 | N/A | N/A | 5497 | 5512 | CGAGAGGTGT | 79 | 1345 |
| | | | | | GTGTCC | | |
| 833372 | N/A | N/A | 5524 | 5539 | GCGATGTGAG | 83 | 1346 |
| | | | | | AAGGCT | | |
| 833388 | N/A | N/A | 5580 | 5595 | ACAGGGACTC | 124 | 1347 |
| | | | | | ATAAAG | | |
| 833404 | N/A | N/A | 5626 | 5641 | AGGCCCCTTG | 109 | 1348 |
| | | | | | GCCGAT | | |
| 833420 | N/A | N/A | 5660 | 5675 | ACGGATGTCA | 63 | 1349 |
| | | | | | CCGGAG | | |
| 833436 | N/A | N/A | 5717 | 5732 | TGGGTCTCTT | 91 | 1350 |
| | | | | | GCTCCC | | |
| 833452 | N/A | N/A | 4849 | 4864 | CTAAGGTCCC | 96 | 1351 |
| | | | | | TGGCTG | | |
| 833468 | N/A | N/A | 4872 | 4887 | ATCCGACCCC | 93 | 1352 |
| | | | | | CAGCAG | | |
| 833484 | N/A | N/A | 4903 | 4918 | GCCGTCATAA | 48 | 1353 |
| | | | | | TCCTGG | | |
| 833500 | N/A | N/A | 4921 | 4936 | TCTTTATCCT | 77 | 1354 |
| | | | | | GGTGGT | | |
| 833532 | N/A | N/A | 2724 | 2739 | CTTCGAGGTA | 92 | 1355 |
| | | | | | CTGCTA | | |
| 833548 | N/A | N/A | 3055 | 3070 | GCCCATGGCC | 52 | 1356 |
| | | | | | ATCATA | | |
| 833564 | N/A | N/A | 3596 | 3611 | AGAGAAGCCC | 70 | 1357 |
| | | | | | TATCGA | | |
| 833580 | N/A | N/A | 3795 | 3810 | GGGTTATACT | 39 | 1358 |
| | | | | | CAGGCT | | |
| 833596 | N/A | N/A | 4043 | 4058 | GCCCAGGAGA | 92 | 1359 |
| | | | | | CCGGCT | | |
| 833612 | N/A | N/A | 5763 | 5778 | CGCCGTACCT | 63 | 1360 |
| | | | | | CCCAGC | | |
| 833628 | N/A | N/A | 6036 | 6051 | GAAATTGCCA | 64 | 1361 |
| | | | | | TTCACG | | |
| 833644 | N/A | N/A | 6618 | 6633 | GAACGAAGAC | 65 | 1362 |
| | | | | | CTCCAC | | |
| 833660 | N/A | N/A | 6938 | 6953 | ACTTGACGGA | 79 | 1363 |
| | | | | | CAAGGG | | |
| 833676 | N/A | N/A | 7428 | 7443 | GACGAGGTGG | 100 | 1364 |
| | | | | | GTTTCT | | |
| 833692 | N/A | N/A | 7927 | 7942 | AAAAGCTGGG | 98 | 1365 |
| | | | | | CTACCC | | |
| 833708 | N/A | N/A | 8466 | 8481 | AGCAAAAGAT | 111 | 1366 |
| | | | | | GCCCTC | | |
| 833724 | N/A | N/A | 8951 | 8966 | TGCCATGTCC | 68 | 1367 |
| | | | | | AGGGTC | | |
| 833740 | N/A | N/A | 9375 | 9390 | TTATTAGCAG | 66 | 1368 |
| | | | | | CAGGGT | | |
| 833756 | N/A | N/A | 10000 | 10015 | GGCTTACTGG | 47 | 1369 |
| | | | | | TCAGGC | | |
| 833772 | N/A | N/A | 10694 | 10709 | ATAATGACAC | 63 | 1370 |
| | | | | | ATCCTT | | |
| 833787 | N/A | N/A | 11415 | 11430 | GGATAGCATA | 55 | 1371 |
| | | | | | GCTTGA | | |
| 833803 | N/A | N/A | 11770 | 11785 | CCGCAGTCTG | 84 | 1372 |
| | | | | | GTTTAA | | |
| 833819 | N/A | N/A | 12413 | 12428 | ACATTCTGGG | 74 | 1373 |
| | | | | | ATGGCA | | |
| 833835 | N/A | N/A | 12710 | 12725 | ACCCGGAGGC | 97 | 1374 |
| | | | | | AGTGCC | | |
| 833851 | N/A | N/A | 13063 | 13078 | TTTGACAAGG | 77 | 1375 |
| | | | | | ATAGGA | | |
| 833867 | N/A | N/A | 13358 | 13373 | CGACATGGTT | 102 | 1376 |
| | | | | | GGGCAG | | |
| 833883 | N/A | N/A | 14160 | 14175 | CACTAGAGGT | 101 | 1377 |
| | | | | | GGACAG | | |
| 833899 | N/A | N/A | 14592 | 14607 | TCAACAGATA | 65 | 1378 |
| | | | | | TGGTGC | | |
| 833915 | N/A | N/A | 15478 | 15493 | CACTATCATG | 59 | 1379 |
| | | | | | TCAGCC | | |
| 833931 | N/A | N/A | 16008 | 16023 | CCCCACTTAA | 125 | 1380 |
| | | | | | TAAGCC | | |
| 833947 | N/A | N/A | 16508 | 16523 | AAAGGACCTT | 110 | 1381 |
| | | | | | TCGAGG | | |
| 833963 | N/A | N/A | 17424 | 17439 | GTTCATGGTA | 69 | 1382 |
| | | | | | CACTAC | | |
| 833979 | N/A | N/A | 18018 | 18033 | GACAATTTAG | 60 | 1383 |
| | | | | | ACACTC | | |
| 833995* | N/A | N/A | 18920 | 18935 | GGACACAGAT | 99 | 1384 |
| | | | | | TGCACA | | |
| 834011* | N/A | N/A | 19278 | 19293 | TCCCGGTACA | 92 | 1385 |
| | | | | | GGTGAG | | |
| 834027* | N/A | N/A | 19527 | 19542 | CAGGAGGGCC | 124 | 1386 |
| | | | | | CCGAGA | | |

TABLE 19
Reduction of SPDEF RNA by 4 μM 3-10-3 cEt
gapmers with a phosphorothioate backbone

| | SEQ | SEQ | SEQ | SEQ | | | |
|---|---|---|---|---|---|---|---|
| | ID | ID | ID | ID | | | |
| | NO: | NO: | NO: | NO: | | | |
| Com- | 1 | 1 | 2 | 2 | | SPDEF | SEQ |
| pound | Start | Stop | Start | Stop | Sequence | (% | ID |
| Number | Site | Site | Site | Site | (5′ to 3′) | UTC) | NO |
| 801766 | 712 | 727 | 13823 | 13838 | CTGTCAATGA | 60 | 33 |
| | | | | | CCGGGC | | |
| 832835 | 51 | 66 | 1718 | 1733 | AGTGTGGACA | 71 | 1387 |
| | | | | | CGGCAG | | |
| 832851 | 131 | 146 | 1798 | 1813 | CTGCTGGCAC | 73 | 1388 |
| | | | | | CGTGGC | | |
| 832867 | 238 | 253 | 1905 | 1920 | AGCACTCAGG | 100 | 1389 |
| | | | | | TTGGCC | | |
| 832883 | 404 | 419 | 13515 | 13530 | GCTGGCGGCT | 96 | 1390 |
| | | | | | GTGTCT | | |
| 832899 | 444 | 459 | 13555 | 13570 | TCAGACCCGG | 87 | 1391 |
| | | | | | GCTGGC | | |
| 832915 | 504 | 519 | 13615 | 13630 | CCAAGCCTGT | 58 | 1392 |
| | | | | | CCGCGA | | |
| 832931 | 553 | 568 | 13664 | 13679 | GGACTCCAGT | 99 | 1393 |
| | | | | | CCCGTC | | |
| 832947 | 597 | 612 | 13708 | 13723 | GGTAGAAGGC | 76 | 1394 |
| | | | | | GGACAG | | |
| 832963 | 673 | 688 | 13784 | 13799 | TCCTCCCGAC | 79 | 1395 |
| | | | | | TGCTGG | | |
| 832979 | 752 | 767 | 13863 | 13878 | CCCGCCGGGC | 75 | 1396 |
| | | | | | ACCAAG | | |
| 832995 | 794 | 809 | 13905 | 13920 | CATGGACTGC | 77 | 1397 |
| | | | | | ACCTGC | | |
| 833011 | 826 | 841 | 13937 | 13952 | GTCTCGATGT | 79 | 1398 |
| | | | | | CCTTGA | | |
| 833026 | 858 | 873 | N/A | N/A | GATCTGCGGT | 93 | 1399 |
| | | | | | GATGTT | | |
| 833042 | 964 | 979 | 16913 | 16928 | TCCTTGCCCG | 80 | 1400 |
| | | | | | CCAGCT | | |
| 833056 | 994 | 1009 | 16943 | 16958 | CGGAACTGCT | 87 | 1401 |
| | | | | | CCTCCG | | |
| 833068 | 1068 | 1083 | 18438 | 18453 | CTTTCATCCA | 70 | 1402 |
| | | | | | GGCCGC | | |
| 833084 | 1097 | 1112 | 18467 | 18482 | GTAGTGAATC | 64 | 1403 |
| | | | | | GCCCCA | | |
| 833100 | 1129 | 1144 | 18617 | 18632 | TCGGTCCAGC | 108 | 1404 |
| | | | | | TCTCCT | | |
| 833116 | 1155 | 1170 | 18643 | 18658 | CGGAGCATGA | 116 | 1405 |
| | | | | | TGAGTC | | |
| 833130 | 1205 | 1220 | 18693 | 18708 | GGGCTTGAGT | 92 | 1406 |
| | | | | | AGCAAC | | |
| 833144* | 1243 | 1258 | 18731 | 18746 | TCCTTGTTGA | 10 | 1407 |
| | | | | | GCCACC | | |
| 833149 | 1384 | 1399 | 19669 | 19684 | TCTGGCTTCC | 74 | 1408 |
| | | | | | GGATGA | | |
| 833165 | 1521 | 1536 | 19806 | 19821 | GACTGCCCGT | 63 | 1409 |
| | | | | | TTTCCC | | |
| 833181 | 1615 | 1630 | 19900 | 19915 | AGGGTCCCGA | 86 | 1410 |
| | | | | | AGGCCC | | |
| 833197 | 1764 | 1779 | 20049 | 20064 | GGACTGCCTG | 69 | 1411 |
| | | | | | TGGCCT | | |
| 833213 | N/A | N/A | 4951 | 4966 | GTGCCAGAGC | 71 | 1412 |
| | | | | | TAGAGG | | |
| 833229 | N/A | N/A | 5020 | 5035 | CCTTGCCCCG | 93 | 1413 |
| | | | | | CAACCA | | |
| 833245 | N/A | N/A | 5057 | 5072 | AAAGCAACTT | 80 | 1414 |
| | | | | | GCTACC | | |
| 833261 | N/A | N/A | 5158 | 5173 | GACCGGTTCC | 89 | 1415 |
| | | | | | CACCTG | | |
| 833277 | N/A | N/A | 5210 | 5225 | TGCTTCAAAC | 49 | 1416 |
| | | | | | AAGGTT | | |
| 833293 | N/A | N/A | 5282 | 5297 | AAGTGAAGGA | 69 | 1417 |
| | | | | | CTCCAA | | |
| 833309 | N/A | N/A | 5347 | 5362 | ATTCCTGCGC | 57 | 1418 |
| | | | | | CCTGAT | | |
| 833325 | N/A | N/A | 5390 | 5405 | GGTTGTTGGT | 84 | 1419 |
| | | | | | CTGTAA | | |
| 833341 | N/A | N/A | 5456 | 5471 | GCCGTGTTTC | 77 | 1420 |
| | | | | | TGCGGC | | |
| 833357 | N/A | N/A | 5498 | 5513 | CCGAGAGGTG | 97 | 1421 |
| | | | | | TGTGTC | | |
| 833373 | N/A | N/A | 5525 | 5540 | AGCGATGTGA | 99 | 1422 |
| | | | | | GAAGGC | | |
| 833389 | N/A | N/A | 5581 | 5596 | AACAGGGACT | 123 | 1423 |
| | | | | | CATAAA | | |
| 833405 | N/A | N/A | 5627 | 5642 | GAGGCCCCTT | 95 | 1424 |
| | | | | | GGCCGA | | |
| 833421 | N/A | N/A | 5661 | 5676 | CACGGATGTC | 80 | 1425 |
| | | | | | ACCGGA | | |
| 833437 | N/A | N/A | 5728 | 5743 | GTGAGGTTTC | 85 | 1426 |
| | | | | | CTGGGT | | |
| 833453 | N/A | N/A | 4850 | 4865 | ACTAAGGTCC | 85 | 1427 |
| | | | | | CTGGCT | | |
| 833469 | N/A | N/A | 4873 | 4888 | CATCCGACCC | 112 | 1428 |
| | | | | | CCAGCA | | |
| 833485 | N/A | N/A | 4904 | 4919 | CGCCGTCATA | 74 | 1429 |
| | | | | | ATCCTG | | |
| 833501 | N/A | N/A | 18265 | 18280 | TTACAAGAAG | 112 | 1430 |
| | | | | | CTGCTT | | |
| 833533 | N/A | N/A | 2735 | 2750 | GAAATGAGCA | 76 | 1431 |
| | | | | | CCTTCG | | |
| 833549 | N/A | N/A | 3126 | 3141 | ATGCAGCTTT | 65 | 1432 |
| | | | | | ATTGGG | | |
| 833565 | N/A | N/A | 3611 | 3626 | TCAGACTTGG | 62 | 1433 |
| | | | | | TTGACA | | |
| 833581 | N/A | N/A | 3799 | 3814 | CCCCGGGTTA | 46 | 1434 |
| | | | | | TACTCA | | |
| 833597 | N/A | N/A | 4268 | 4283 | AAGAAGCGGA | 79 | 1435 |
| | | | | | AGGTGA | | |
| 833613 | N/A | N/A | 5768 | 5783 | GCATACGCCG | 76 | 1436 |
| | | | | | TACCTC | | |
| 833629 | N/A | N/A | 6067 | 6082 | TACAATTCCG | 83 | 1437 |
| | | | | | CTCAAC | | |
| 833645 | N/A | N/A | 6620 | 6635 | AAGAACGAAG | 66 | 1438 |
| | | | | | ACCTCC | | |
| 833661 | N/A | N/A | 6940 | 6955 | CCACTTGACG | 89 | 1439 |
| | | | | | GACAAG | | |
| 833677 | N/A | N/A | 7437 | 7452 | GCATGAGTAG | 81 | 1440 |
| | | | | | ACGAGG | | |
| 833693 | N/A | N/A | 8036 | 8051 | CCTTAAATGG | 97 | 1441 |
| | | | | | GCTGGA | | |
| 833709 | N/A | N/A | 8480 | 8495 | CCCCAACTGG | 91 | 1442 |
| | | | | | CATCAG | | |
| 833725 | N/A | N/A | 8986 | 9001 | CCGTAGGCCA | 96 | 1443 |
| | | | | | AGGGTC | | |
| 833741 | N/A | N/A | 9377 | 9392 | GCTTATTAGC | 52 | 1444 |
| | | | | | AGCAGG | | |
| 833757 | N/A | N/A | 10083 | 10098 | GGAAAGGTTC | 64 | 1445 |
| | | | | | GACTCT | | |
| 833773 | N/A | N/A | 10699 | 10714 | GGCATATAAT | 46 | 1446 |
| | | | | | GACACA | | |
| 833788 | N/A | N/A | 11417 | 11432 | CTGGATAGCA | 79 | 1447 |
| | | | | | TAGCTT | | |
| 833804 | N/A | N/A | 11847 | 11862 | CGCCACCTCG | 97 | 1448 |
| | | | | | GAGCTT | | |
| 833820 | N/A | N/A | 12431 | 12446 | AAGCACTGAA | 95 | 1449 |
| | | | | | ACCCCA | | |
| 833836 | N/A | N/A | 12722 | 12737 | GAGCATGCGG | 92 | 1450 |
| | | | | | CCACCC | | |
| 833852 | N/A | N/A | 13066 | 13081 | GCCTTTGACA | 75 | 1451 |
| | | | | | AGGATA | | |
| 833868 | N/A | N/A | 13360 | 13375 | CACGACATGG | 46 | 1452 |
| | | | | | TTGGGC | | |
| 833884 | N/A | N/A | 14162 | 14177 | GACACTAGAG | 95 | 1453 |
| | | | | | GTGGAC | | |
| 833900 | N/A | N/A | 14594 | 14609 | GATCAACAGA | 82 | 1454 |
| | | | | | TATGGT | | |
| 833916 | N/A | N/A | 15561 | 15576 | CTAGGAGGTC | 81 | 1455 |
| | | | | | CCCTCC | | |
| 833932 | N/A | N/A | 16063 | 16078 | GTGAACACCA | 50 | 1456 |
| | | | | | TGGTCC | | |
| 833948 | N/A | N/A | 16512 | 16527 | CTCCAAAGGA | 90 | 1457 |
| | | | | | CCTTTC | | |
| 833964 | N/A | N/A | 17522 | 17537 | ATAGACTTTC | 66 | 1458 |
| | | | | | CCTGGA | | |
| 833980 | N/A | N/A | 18118 | 18133 | TCCTATGAGT | 53 | 1459 |
| | | | | | TGGTCC | | |
| 833996* | N/A | N/A | 18956 | 18971 | TCCTAAGTGA | 66 | 1460 |
| | | | | | GACAGA | | |
| 834012* | N/A | N/A | 19286 | 19301 | CACAAACCTC | 107 | 1461 |
| | | | | | CCGGTA | | |
| 834028* | N/A | N/A | 19543 | 19558 | TTGAAGATGC | 95 | 1462 |
| | | | | | CTAGAG | | |

TABLE 20
Reduction of SPDEF RNA by 4 μM 3-10-3 cEt
gapmers with a phosphorothioate backbone

| | SEQ | SEQ | SEQ | SEQ | | | |
|---|---|---|---|---|---|---|---|
| | ID | ID | ID | ID | | | |
| | NO: | NO: | NO: | NO: | | | |
| Com- | 1 | 1 | 2 | 2 | | SPDEF | SEQ |
| pound | Start | Stop | Start | Stop | Sequence | (% | ID |
| Number | Site | Site | Site | Site | (5′ to 3′) | UTC) | NO |
| 652502* | 1219 | 1234 | 18707 | 18722 | CGGCCATAGC | 106 | 1463 |
| | | | | | TGTGGG | | |
| 801766 | 712 | 727 | 13823 | 13838 | CTGTCAATGA | 55 | 33 |
| | | | | | CCGGGC | | |
| 832836 | 53 | 68 | 1720 | 1735 | GCAGTGTGGA | 70 | 1464 |
| | | | | | CACGGC | | |
| 832852 | 160 | 175 | 1827 | 1842 | GGAGTCCCCT | 79 | 1465 |
| | | | | | ACCCCC | | |
| 832868 | 239 | 254 | 1906 | 1921 | CAGCACTCAG | 81 | 1466 |
| | | | | | GTTGGC | | |
| 832884 | 405 | 420 | 13516 | 13531 | GGCTGGCGGC | 80 | 1467 |
| | | | | | TGTGTC | | |
| 832900 | 445 | 460 | 13556 | 13571 | CTCAGACCCG | 65 | 1468 |
| | | | | | GGCTGG | | |
| 832916 | 505 | 520 | 13616 | 13631 | TCCAAGCCTG | 79 | 1469 |
| | | | | | TCCGCG | | |
| 832932 | 554 | 569 | 13665 | 13680 | GGGACTCCAG | 107 | 1470 |
| | | | | | TCCCGT | | |
| 832948 | 598 | 613 | 13709 | 13724 | AGGTAGAAGG | 87 | 1471 |
| | | | | | CGGACA | | |
| 832964 | 674 | 689 | 13785 | 13800 | CTCCTCCCGA | 84 | 1472 |
| | | | | | CTGCTG | | |
| 832980 | 753 | 768 | 13864 | 13879 | GCCCGCCGGG | 89 | 1473 |
| | | | | | CACCAA | | |
| 832996 | 795 | 810 | 13906 | 13921 | CCATGGACTG | 66 | 1474 |
| | | | | | CACCTG | | |
| 833012 | 827 | 842 | 13938 | 13953 | CGTCTCGATG | 64 | 1475 |
| | | | | | TCCTTG | | |
| 833027 | 859 | 874 | N/A | N/A | GGATCTGCGG | 83 | 1476 |
| | | | | | TGATGT | | |
| 833043 | 966 | 981 | 16915 | 16930 | GCTCCTTGCC | 75 | 1477 |
| | | | | | CGCCAG | | |
| 833057 | 996 | 1011 | 16945 | 16960 | GGCGGAACTG | 64 | 1478 |
| | | | | | CTCCTC | | |
| 833069 | 1074 | 1089 | 18444 | 18459 | TCCGCTCTTT | 72 | 1479 |
| | | | | | CATCCA | | |
| 833085 | 1099 | 1114 | 18469 | 18484 | CAGTAGTGAA | 63 | 1480 |
| | | | | | TCGCCC | | |
| 833101 | 1131 | 1146 | 18619 | 18634 | TGTCGGTCCA | 108 | 1481 |
| | | | | | GCTCTC | | |
| 833117 | 1157 | 1172 | 18645 | 18660 | CCCGGAGCAT | 38 | 1482 |
| | | | | | GATGAG | | |
| 833145* | 1244 | 1259 | 18732 | 18747 | CTCCTTGTTG | 14 | 1483 |
| | | | | | AGCCAC | | |
| 833150 | 1385 | 1400 | 19670 | 19685 | GTCTGGCTTC | 101 | 1484 |
| | | | | | CGGATG | | |
| 833166 | 1522 | 1537 | 19807 | 19822 | AGACTGCCCG | 79 | 1485 |
| | | | | | TTTTCC | | |
| 833182 | 1617 | 1632 | 19902 | 19917 | CCAGGGTCCC | 86 | 1486 |
| | | | | | GAAGGC | | |
| 833198 | 1765 | 1780 | 20050 | 20065 | TGGACTGCCT | 59 | 1487 |
| | | | | | GTGGCC | | |
| 833214 | N/A | N/A | 4952 | 4967 | TGTGCCAGAG | 81 | 1488 |
| | | | | | CTAGAG | | |
| 833230 | N/A | N/A | 5021 | 5036 | GCCTTGCCCC | 78 | 1489 |
| | | | | | GCAACC | | |
| 833246 | N/A | N/A | 5064 | 5079 | AGCCCTCAAA | 81 | 1490 |
| | | | | | GCAACT | | |
| 833262 | N/A | N/A | 5159 | 5174 | GGACCGGTTC | 68 | 1491 |
| | | | | | CCACCT | | |
| 833278 | N/A | N/A | 5211 | 5226 | TTGCTTCAAA | 65 | 1492 |
| | | | | | CAAGGT | | |
| 833294 | N/A | N/A | 5283 | 5298 | AAAGTGAAGG | 83 | 1493 |
| | | | | | ACTCCA | | |
| 833310 | N/A | N/A | 5348 | 5363 | CATTCCTGCG | 72 | 1494 |
| | | | | | CCCTGA | | |
| 833326 | N/A | N/A | 5391 | 5406 | TGGTTGTTGG | 98 | 1495 |
| | | | | | TCTGTA | | |
| 833342 | N/A | N/A | 5457 | 5472 | TGCCGTGTTT | 82 | 1496 |
| | | | | | CTGCGG | | |
| 833358 | N/A | N/A | 5499 | 5514 | CCCGAGAGGT | 102 | 1497 |
| | | | | | GTGTGT | | |
| 833374 | N/A | N/A | 5526 | 5541 | CAGCGATGTG | 104 | 1498 |
| | | | | | AGAAGG | | |
| 833390 | N/A | N/A | 5582 | 5597 | AAACAGGGAC | 94 | 1499 |
| | | | | | TCATAA | | |
| 833406 | N/A | N/A | 5628 | 5643 | TGAGGCCCCT | 82 | 1500 |
| | | | | | TGGCCG | | |
| 833422 | N/A | N/A | 5663 | 5678 | CACACGGAT | 85 | 1501 |
| | | | | | GTCACCG | | |
| 833438 | N/A | N/A | 5749 | 5764 | GCTTGCCACA | 63 | 1502 |
| | | | | | GGACAG | | |
| 833454 | N/A | N/A | 4851 | 4866 | CACTAAGGTC | 84 | 1503 |
| | | | | | CCTGGC | | |
| 833470 | N/A | N/A | 4874 | 4889 | CCATCCGACC | 86 | 1504 |
| | | | | | CCCAGC | | |
| 833486 | N/A | N/A | 4905 | 4920 | GCGCCGTCAT | 58 | 1505 |
| | | | | | AATCCT | | |
| 833502 | N/A | N/A | 18269 | 18284 | CTGGTTACAA | 65 | 1506 |
| | | | | | GAAGCT | | |
| 833518 | N/A | N/A | 2090 | 2105 | TGCCAGGGTA | 75 | 1507 |
| | | | | | CCCCCA | | |
| 833534 | N/A | N/A | 2737 | 2752 | TAGAAATGAG | 95 | 1508 |
| | | | | | CACCTT | | |
| 833550 | N/A | N/A | 3256 | 3271 | GCTGAACCAT | 89 | 1509 |
| | | | | | GGCCTG | | |
| 833566 | N/A | N/A | 3613 | 3628 | CCTCAGACTT | 84 | 1510 |
| | | | | | GGTTGA | | |
| 833582 | N/A | N/A | 3807 | 3822 | ATTAACTTCC | 80 | 1511 |
| | | | | | CCGGGT | | |
| 833598 | N/A | N/A | 4367 | 4382 | GTTGAGTGTA | 87 | 1512 |
| | | | | | CATGAG | | |
| 833614 | N/A | N/A | 5771 | 5786 | CCCGCATACG | 77 | 1513 |
| | | | | | CCGTAC | | |
| 833630 | N/A | N/A | 6069 | 6084 | ACTACAATTC | 70 | 1514 |
| | | | | | CGCTCA | | |
| 833646 | N/A | N/A | 6623 | 6638 | GGAAAGAAC | 86 | 1515 |
| | | | | | GAAGACC | | |
| 833662 | N/A | N/A | 6942 | 6957 | TCCCACTTG | 75 | 1516 |
| | | | | | ACGGACA | | |
| 833678 | N/A | N/A | 7439 | 7454 | CAGCATGAGT | 54 | 1517 |
| | | | | | AGACGA | | |
| 833694 | N/A | N/A | 8091 | 8106 | GGCCTACTGA | 83 | 1518 |
| | | | | | GCTGTC | | |
| 833710 | N/A | N/A | 8530 | 8545 | CTAGAAATGT | 92 | 1519 |
| | | | | | GCCCCT | | |
| 833726 | N/A | N/A | 8989 | 9004 | GCTCCGTAGG | 63 | 1520 |
| | | | | | CCAAGG | | |
| 833742 | N/A | N/A | 9391 | 9406 | GAAGGGATTC | 78 | 1521 |
| | | | | | ATGTGC | | |
| 833758 | N/A | N/A | 10086 | 10101 | GGAGGAAAGG | 60 | 1522 |
| | | | | | TTCGAC | | |
| 833774 | N/A | N/A | 10714 | 10729 | AGCTTTTGCC | 78 | 1523 |
| | | | | | AGGAAG | | |
| 833789 | N/A | N/A | 11419 | 11434 | CCCTGGATAG | 62 | 1524 |
| | | | | | CATAGC | | |
| 833805 | N/A | N/A | 11880 | 11895 | CTCCAAATGT | 63 | 1525 |
| | | | | | GCCGTC | | |
| 833821 | N/A | N/A | 12434 | 12449 | CGCAAGCACT | 81 | 1526 |
| | | | | | GAAACC | | |
| 833837 | N/A | N/A | 12737 | 12752 | CCCCGATGCC | 102 | 1527 |
| | | | | | TGGAGG | | |
| 833853 | N/A | N/A | 13092 | 13107 | GATATAGCAA | 62 | 1528 |
| | | | | | AGCTTG | | |
| 833869 | N/A | N/A | 13363 | 13378 | AGCCACGACA | 102 | 1529 |
| | | | | | TGGTTG | | |
| 833885 | N/A | N/A | 14208 | 14223 | TATCATCCAG | 71 | 1530 |
| | | | | | CACCTA | | |
| 833901 | N/A | N/A | 14599 | 14614 | AGCGAGATCA | 55 | 1531 |
| | | | | | ACAGAT | | |
| 833917 | N/A | N/A | 15563 | 15578 | CCCTAGGAGG | 81 | 1532 |
| | | | | | TCCCCT | | |
| 833933 | N/A | N/A | 16089 | 16104 | GGGCATGGTC | 72 | 1533 |
| | | | | | ACAATG | | |
| 833949 | N/A | N/A | 16570 | 16585 | GTGCATCTGT | 67 | 1534 |
| | | | | | ACTGCC | | |
| 833965 | N/A | N/A | 17533 | 17548 | CTCGAGTATT | 58 | 1535 |
| | | | | | CATAGA | | |
| 833981 | N/A | N/A | 18128 | 18143 | TCTGACAGGG | 68 | 1536 |
| | | | | | TCCTAT | | |
| 833997* | N/A | N/A | 18968 | 18983 | CAGTACTAAA | 68 | 1537 |
| | | | | | ACTCCT | | |
| 834013* | N/A | N/A | 19300 | 19315 | GAATACTCTG | 96 | 1538 |
| | | | | | GAGTCA | | |
| 834029 | N/A | N/A | 20191 | 20206 | GGACATGTCA | 89 | 1539 |
| | | | | | GTTCTC | | |

TABLE 21
Reduction of SPDEF RNA by 4 μM 3-10-3 cEt
gapmers with a phosphorothioate backbone

| | SEQ | SEQ | SEQ | SEQ | | | |
|---|---|---|---|---|---|---|---|
| | ID | ID | ID | ID | | | |
| | NO: | NO: | NO: | NO: | | | |
| Com- | 1 | 1 | 2 | 2 | | SPDEF | SEQ |
| pound | Start | Stop | Start | Stop | Sequence | (% | ID |
| Number | Site | Site | Site | Site | (5′ to 3′) | UTC) | NO |
| 652506* | 1245 | 1260 | 18733 | 18748 | TCTCCTTGTT | 22 | 1540 |
| | | | | | GAGCCA | | |
| 801766 | 712 | 727 | 13823 | 13838 | CTGTCAATGA | 71 | 33 |
| | | | | | CCGGGC | | |
| 832837 | 71 | 86 | 1738 | 1753 | GAGGACTGGG | 91 | 1541 |
| | | | | | TCTGTG | | |
| 832853 | 161 | 176 | 1828 | 1843 | GGGAGTCCCC | 106 | 1542 |
| | | | | | TACCCC | | |
| 832869 | 240 | 255 | 1907 | 1922 | GCAGCACTCA | 106 | 1543 |
| | | | | | GGTTGG | | |
| 832885 | 407 | 422 | 13518 | 13533 | TGGGCTGGCG | 78 | 1544 |
| | | | | | GCTGTG | | |
| 832901 | 446 | 461 | 13557 | 13572 | GCTCAGACCC | 90 | 1545 |
| | | | | | GGGCTG | | |
| 832917 | 507 | 522 | 13618 | 13633 | TCTCCAAGCC | 75 | 1546 |
| | | | | | TGTCCG | | |
| 832933 | 558 | 573 | 13669 | 13684 | GACTGGGACT | 86 | 1547 |
| | | | | | CCAGTC | | |
| 832949 | 601 | 616 | 13712 | 13727 | GAGAGGTAGA | 78 | 1548 |
| | | | | | AGGCGG | | |
| 832965 | 675 | 690 | 13786 | 13801 | GCTCCTCCCG | 63 | 1549 |
| | | | | | ACTGCT | | |
| 832981 | 754 | 769 | 13865 | 13880 | AGCCCGCCGG | 94 | 1550 |
| | | | | | GCACCA | | |
| 832997 | 798 | 813 | 13909 | 13924 | CCACCATGGA | 73 | 1551 |
| | | | | | CTGCAC | | |
| 833013 | 829 | 844 | 13940 | 13955 | GCCGTCTCGA | 47 | 1552 |
| | | | | | TGTCCT | | |
| 833028 | 862 | 877 | N/A | N/A | ATGGGATCTG | 84 | 1553 |
| | | | | | CGGTGA | | |
| 833044 | 968 | 983 | 16917 | 16932 | CAGCTCCTTG | 80 | 1554 |
| | | | | | CCCGCC | | |
| 833058 | 997 | 1012 | 16946 | 16961 | TGGCGGAACT | 102 | 1555 |
| | | | | | GCTCCT | | |
| 833070 | 1076 | 1091 | 18446 | 18461 | AGTCCGCTCT | 83 | 1556 |
| | | | | | TTCATC | | |
| 833086 | 1101 | 1116 | 18471 | 18486 | CACAGTAGTG | 85 | 1557 |
| | | | | | AATCGC | | |
| 833102 | 1132 | 1147 | 18620 | 18635 | CTGTCGGTCC | 82 | 1558 |
| | | | | | AGCTCT | | |
| 833118 | 1159 | 1174 | 18647 | 18662 | TGCCCGGAGC | 103 | 1559 |
| | | | | | ATGATG | | |
| 833131* | 1221 | 1236 | 18709 | 18724 | AGCGGCCATA | 90 | 1560 |
| | | | | | GCTGTG | | |
| 833151 | 1387 | 1402 | 19672 | 19687 | ATGTCTGGCT | 82 | 1561 |
| | | | | | TCCGGA | | |
| 833167 | 1523 | 1538 | 19808 | 19823 | CAGACTGCCC | 72 | 1562 |
| | | | | | GTTTTC | | |
| 833183 | 1618 | 1633 | 19903 | 19918 | CCCAGGGTCC | 106 | 1563 |
| | | | | | CGAAGG | | |
| 833199 | 1834 | 1849 | 20119 | 20134 | AGATGTCTCC | 67 | 1564 |
| | | | | | CTGCAC | | |
| 833215 | N/A | N/A | 4953 | 4968 | CTGTGCCAGA | 90 | 1565 |
| | | | | | GCTAGA | | |
| 833231 | N/A | N/A | 5022 | 5037 | GGCCTTGCCC | 99 | 1566 |
| | | | | | CGCAAC | | |
| 833247 | N/A | N/A | 5077 | 5092 | GCTAGGTCCC | 91 | 1567 |
| | | | | | AGCAGC | | |
| 833263 | N/A | N/A | 5160 | 5175 | AGGACCGGTT | 61 | 1568 |
| | | | | | CCCACC | | |
| 833279 | N/A | N/A | 5230 | 5245 | GACAGGCTAA | 87 | 1569 |
| | | | | | GAACAG | | |
| 833295 | N/A | N/A | 5284 | 5299 | CAAAGTGAAG | 68 | 1570 |
| | | | | | GACTCC | | |
| 833311 | N/A | N/A | 5349 | 5364 | ACATTCCTGC | 64 | 1571 |
| | | | | | GCCCTG | | |
| 833327 | N/A | N/A | 5392 | 5407 | CTGGTTGTTG | 89 | 1572 |
| | | | | | GTCTGT | | |
| 833343 | N/A | N/A | 5458 | 5473 | CTGCCGTGTT | 56 | 1573 |
| | | | | | TCTGCG | | |
| 833359 | N/A | N/A | 5500 | 5515 | TCCCGAGAGG | 74 | 1574 |
| | | | | | TGTGTG | | |
| 833375 | N/A | N/A | 5527 | 5542 | ACAGCGATGT | 88 | 1575 |
| | | | | | GAGAAG | | |
| 833391 | N/A | N/A | 5586 | 5601 | AGTGAAACAG | 84 | 1576 |
| | | | | | GGACTC | | |
| 833407 | N/A | N/A | 5629 | 5644 | CTGAGGCCCC | 79 | 1577 |
| | | | | | TTGGCC | | |
| 833423 | N/A | N/A | 5664 | 5679 | ACACACGGAT | 82 | 1578 |
| | | | | | GTCACC | | |
| 833455 | N/A | N/A | 4852 | 4867 | ACACTAAGGT | 75 | 1579 |
| | | | | | CCCTGG | | |
| 833471 | N/A | N/A | 4876 | 4891 | TCCCATCCGA | 95 | 1580 |
| | | | | | CCCCCA | | |
| 833487 | N/A | N/A | 4906 | 4921 | TGCGCCGTCA | 52 | 1581 |
| | | | | | TAATCC | | |
| 833503 | N/A | N/A | 18270 | 18285 | GCTGGTTACA | 108 | 1582 |
| | | | | | AGAAGC | | |
| 833519 | N/A | N/A | 2102 | 2117 | GGAAAGACCC | 117 | 1583 |
| | | | | | CATGCC | | |
| 833535 | N/A | N/A | 2760 | 2775 | CACCGCAGAA | 69 | 1584 |
| | | | | | ATCTGG | | |
| 833551 | N/A | N/A | 3373 | 3388 | CGAGAATGCC | 71 | 1585 |
| | | | | | CCCCAC | | |
| 833567 | N/A | N/A | 3647 | 3662 | ATCGACTGAG | 42 | 1586 |
| | | | | | CACCTA | | |
| 833583 | N/A | N/A | 3878 | 3893 | CCACATGGCG | 96 | 1587 |
| | | | | | GGACCT | | |
| 833599 | N/A | N/A | 4375 | 4390 | TATGATGGGT | 102 | 1588 |
| | | | | | TGAGTG | | |
| 833615 | N/A | N/A | 5819 | 5834 | TTGAAGGGCC | 87 | 1589 |
| | | | | | GGCCAC | | |
| 833631 | N/A | N/A | 6072 | 6087 | GCAACTACAA | 54 | 1590 |
| | | | | | TTCCGC | | |
| 833647 | N/A | N/A | 6673 | 6688 | CCCCAAGTGG | 68 | 1591 |
| | | | | | ACCATC | | |
| 833663 | N/A | N/A | 6958 | 6973 | GGGCAGCCAG | 97 | 1592 |
| | | | | | CATTAT | | |
| 833679 | N/A | N/A | 7542 | 7557 | CCCATTGTGG | 82 | 1593 |
| | | | | | CCATCT | | |
| 833695 | N/A | N/A | 8099 | 8114 | TCCCATGTGG | 88 | 1594 |
| | | | | | CCTACT | | |
| 833711 | N/A | N/A | 8583 | 8598 | AGATTTAGTG | 56 | 1595 |
| | | | | | CAGCTT | | |
| 833727 | N/A | N/A | 9117 | 9132 | AGTGATGGTC | 67 | 1596 |
| | | | | | CACCCA | | |
| 833743 | N/A | N/A | 9543 | 9558 | CAAGAATCTC | 95 | 1597 |
| | | | | | CCATGG | | |
| 833759 | N/A | N/A | 10102 | 10117 | GGTTAACTGT | 76 | 1598 |
| | | | | | GTGGTT | | |
| 833775 | N/A | N/A | 10842 | 10857 | GCAGAACTCG | 84 | 1599 |
| | | | | | CTTCCC | | |
| 833790 | N/A | N/A | 11466 | 11481 | AGCTAGCCCA | 84 | 1600 |
| | | | | | TTCAAT | | |
| 833806 | N/A | N/A | 11901 | 11916 | TTATAGTTTC | 86 | 1601 |
| | | | | | AAGCAG | | |
| 833822 | N/A | N/A | 12442 | 12457 | GAGAGGTGCG | 70 | 1602 |
| | | | | | CAAGCA | | |
| 833838 | N/A | N/A | 12820 | 12835 | GTGCATGGTA | 85 | 1603 |
| | | | | | CCCACC | | |
| 833854 | N/A | N/A | 13095 | 13110 | CCTGATATAG | 66 | 1604 |
| | | | | | CAAAGC | | |
| 833870 | N/A | N/A | 13366 | 13381 | GGCAGCCACG | 78 | 1605 |
| | | | | | ACATGG | | |
| 833886 | N/A | N/A | 14213 | 14228 | ATTCATATCA | 55 | 1606 |
| | | | | | TCCAGC | | |
| 833902 | N/A | N/A | 14623 | 14638 | TTCTAGTGGA | 62 | 1607 |
| | | | | | GGACAC | | |
| 833918 | N/A | N/A | 15611 | 15626 | CCATAATCAC | 72 | 1608 |
| | | | | | GCCTTC | | |
| 833934 | N/A | N/A | 16120 | 16135 | TCATAGGCCT | 100 | 1609 |
| | | | | | ATAGGT | | |
| 833950 | N/A | N/A | 16580 | 16595 | GGGTAACCTG | 80 | 1610 |
| | | | | | GTGCAT | | |
| 833966 | N/A | N/A | 17535 | 17550 | TGCTCGAGTA | 60 | 1611 |
| | | | | | TTCATA | | |
| 833982 | N/A | N/A | 18196 | 18211 | TGCAACCCCT | 76 | 1612 |
| | | | | | TGTTCA | | |
| 833998* | N/A | N/A | 18971 | 18986 | GTGCAGTACT | 108 | 1613 |
| | | | | | AAAACT | | |
| 834014* | N/A | N/A | 19302 | 19317 | GAGAATACTC | 83 | 1614 |
| | | | | | TGGAGT | | |
| 834030 | N/A | N/A | 20211 | 20226 | ATTCACTGCG | 82 | 1615 |
| | | | | | CAGACA | | |

TABLE 22
Reduction of SPDEF RNA by 4 μM 3-10-3 cEt
gapmers with a phosphorothioate backbone

| | SEQ | SEQ | SEQ | SEQ | | | |
|---|---|---|---|---|---|---|---|
| | ID | ID | ID | ID | | | |
| | NO: | NO: | NO: | NO: | | | |
| Com- | 1 | 1 | 2 | 2 | | SPDEF | SEQ |
| pound | Start | Stop | Start | Stop | Sequence | (% | ID |
| Number | Site | Site | Site | Site | (5′ to 3′) | UTC) | NO |
| 652503* | 1222 | 1237 | 18710 | 18725 | AAGCGGCCAT | 95 | 1616 |
| | | | | | AGCTGT | | |
| 652647 | N/A | N/A | 10906 | 10921 | CGTTAGGACA | 85 | 1617 |
| | | | | | GTCTCT | | |
| 791884* | 1246 | 1261 | 18734 | 18749 | TTCTCCTTGT | 26 | 1618 |
| | | | | | TGAGCC | | |
| 801766 | 712 | 727 | 13823 | 13838 | CTGTCAATGA | 82 | 33 |
| | | | | | CCGGGC | | |
| 832838 | 73 | 88 | 1740 | 1755 | TGGAGGACTG | 91 | 1619 |
| | | | | | GGTCTG | | |
| 832854 | 162 | 177 | 1829 | 1844 | AGGGAGTCCC | 92 | 1620 |
| | | | | | CTACCC | | |
| 832870 | 354 | 369 | 2021 | 2036 | CAGTGCCAA | 75 | 1621 |
| | | | | | CTTCAGG | | |
| 832886 | 408 | 423 | 13519 | 13534 | TTGGGCTGGC | 115 | 1622 |
| | | | | | GGCTGT | | |
| 832902 | 447 | 462 | 13558 | 13573 | TGCTCAGACC | 84 | 1623 |
| | | | | | CGGGCT | | |
| 832918 | 522 | 537 | 13633 | 13648 | CCCCCGCTGC | 78 | 1624 |
| | | | | | CGCCTT | | |
| 832934 | 559 | 574 | 13670 | 13685 | GGACTGGGAC | 90 | 1625 |
| | | | | | TCCAGT | | |
| 832950 | 612 | 627 | 13723 | 13738 | TGTCAAAGTA | 100 | 1626 |
| | | | | | GGAGAG | | |
| 832966 | 677 | 692 | 13788 | 13803 | TGGCTCCTCC | 70 | 1627 |
| | | | | | CGACTG | | |
| 832982 | 756 | 771 | 13867 | 13882 | TCAGCCCGCC | 106 | 1628 |
| | | | | | GGGCAC | | |
| 832998 | 808 | 823 | 13919 | 13934 | ACTTCGCCCA | 95 | 1629 |
| | | | | | CCACCA | | |
| 833014 | 831 | 846 | 13942 | 13957 | AGGCCGTCTC | 51 | 1630 |
| | | | | | GATGTC | | |
| 833029 | 864 | 879 | N/A | N/A | CCATGGGATC | 109 | 1631 |
| | | | | | TGCGGT | | |
| 833045 | 974 | 989 | 16923 | 16938 | GGCGCACAGC | 83 | 1632 |
| | | | | | TCCTTG | | |
| 833059 | 1000 | 1015 | 16949 | 16964 | CGCTGGCGGA | 105 | 1633 |
| | | | | | ACTGCT | | |
| 833071 | 1077 | 1092 | 18447 | 18462 | AAGTCCGCTC | 118 | 1634 |
| | | | | | TTTCAT | | |
| 833087 | 1102 | 1117 | N/A | N/A | GCACAGTAGT | 90 | 1635 |
| | | | | | GAATCG | | |
| 833103 | 1133 | 1148 | 18621 | 18636 | GCTGTCGGTC | 103 | 1636 |
| | | | | | CAGCTC | | |
| 833119 | 1160 | 1175 | 18648 | 18663 | CTGCCCGGAG | 98 | 1637 |
| | | | | | CATGAT | | |
| 833152 | 1388 | 1403 | 19673 | 19688 | GATGTCTGGC | 87 | 1638 |
| | | | | | TTCCGG | | |
| 833168 | 1525 | 1540 | 19810 | 19825 | AGCAGACTGC | 99 | 1639 |
| | | | | | CCGTTT | | |
| 833184 | 1619 | 1634 | 19904 | 19919 | CCCCAGGGT | 91 | 1640 |
| | | | | | CCCGAAG | | |
| 833200 | 1880 | 1895 | 20165 | 20180 | ATTATCCATT | 75 | 1641 |
| | | | | | CCCGGG | | |
| 833216 | N/A | N/A | 4961 | 4976 | CGTCTCCCCT | 80 | 1642 |
| | | | | | GTGCCA | | |
| 833232 | N/A | N/A | 5023 | 5038 | GGGCCTTGCC | 101 | 1643 |
| | | | | | CCGCAA | | |
| 833248 | N/A | N/A | 5079 | 5094 | GAGCTAGGTC | 74 | 1644 |
| | | | | | CCAGCA | | |
| 833264 | N/A | N/A | 5161 | 5176 | CAGGACCGGT | 83 | 1645 |
| | | | | | TCCCAC | | |
| 833280 | N/A | N/A | 5231 | 5246 | TGACAGGCT | 92 | 1646 |
| | | | | | AAGAACA | | |
| 833296 | N/A | N/A | 5291 | 5306 | GTTAGGACA | 80 | 1647 |
| | | | | | AAGTGAA | | |
| 833312 | N/A | N/A | 5350 | 5365 | AACATTCCT | 86 | 1648 |
| | | | | | GCGCCCT | | |
| 833328 | N/A | N/A | 5393 | 5408 | CCTGGTTGT | 73 | 1649 |
| | | | | | TGGTCTG | | |
| 833344 | N/A | N/A | 5459 | 5474 | TCTGCCGTG | 65 | 1650 |
| | | | | | TTTCTGC | | |
| 833360 | N/A | N/A | 5501 | 5516 | CTCCCGAGAG | 93 | 1651 |
| | | | | | GTGTGT | | |
| 833376 | N/A | N/A | 5528 | 5543 | GACAGCGATG | 86 | 1652 |
| | | | | | TGAGAA | | |
| 833392 | N/A | N/A | 5597 | 5612 | GCCTCTTCAG | 75 | 1653 |
| | | | | | CAGTGA | | |
| 833408 | N/A | N/A | 5630 | 5645 | CCTGAGGCCC | 89 | 1654 |
| | | | | | CTTGGC | | |
| 833424 | N/A | N/A | 5665 | 5680 | AACACACGGA | 77 | 1655 |
| | | | | | TGTCAC | | |
| 833456 | N/A | N/A | 4853 | 4868 | CACACTAAGG | 77 | 1656 |
| | | | | | TCCCTG | | |
| 833472 | N/A | N/A | 4878 | 4893 | GGTCCCATCC | 91 | 1657 |
| | | | | | GACCCC | | |
| 833488 | N/A | N/A | 4908 | 4923 | GGTGCGCCGT | 58 | 1658 |
| | | | | | CATAAT | | |
| 833504 | N/A | N/A | 18271 | 18286 | AGCTGGTTAC | 73 | 1659 |
| | | | | | AAGAAG | | |
| 833520 | N/A | N/A | 2158 | 2173 | GGCAAAGTGC | 79 | 1660 |
| | | | | | GCCCCC | | |
| 833536 | N/A | N/A | 2763 | 2778 | CTCCACCGCA | 56 | 1661 |
| | | | | | GAAATC | | |
| 833552 | N/A | N/A | 3375 | 3390 | TCCGAGAATG | 84 | 1662 |
| | | | | | CCCCCC | | |
| 833568 | N/A | N/A | 3651 | 3666 | GAGCATCGAC | 65 | 1663 |
| | | | | | TGAGCA | | |
| 833584 | N/A | N/A | 3900 | 3915 | GAAAAGTGAC | 95 | 1664 |
| | | | | | CCGCCC | | |
| 833600 | N/A | N/A | 4410 | 4425 | GTGGAGATTG | 85 | 1665 |
| | | | | | AGATGG | | |
| 833616 | N/A | N/A | 5821 | 5836 | CCTTGAAGGG | 89 | 1666 |
| | | | | | CCGGCC | | |
| 833632 | N/A | N/A | 6076 | 6091 | CATAGCAACT | 117 | 1667 |
| | | | | | ACAATT | | |
| 833648 | N/A | N/A | 6692 | 6707 | GTACAGAGGC | 91 | 1668 |
| | | | | | CCACCG | | |
| 833664 | N/A | N/A | 6982 | 6997 | TGCTTTGCCG | 79 | 1669 |
| | | | | | GGCCCT | | |
| 833680 | N/A | N/A | 7618 | 7633 | ACAGACCACC | 81 | 1670 |
| | | | | | CCGCTG | | |
| 833696 | N/A | N/A | 8220 | 8235 | CCCCATTGAG | 106 | 1671 |
| | | | | | AAGAGC | | |
| 833712 | N/A | N/A | 8587 | 8602 | GGAGAGATTT | 90 | 1672 |
| | | | | | AGTGCA | | |
| 833728 | N/A | N/A | 9146 | 9161 | ATGCAATTCA | 74 | 1673 |
| | | | | | GCCCAG | | |
| 833744 | N/A | N/A | 9573 | 9588 | CAGCACCCTT | 75 | 1674 |
| | | | | | TCATCA | | |
| 833760 | N/A | N/A | 10108 | 10123 | GTTAATGGTT | 98 | 1675 |
| | | | | | AACTGT | | |
| 833791 | N/A | N/A | 11470 | 11485 | CCACAGCTAG | 100 | 1676 |
| | | | | | CCCATT | | |
| 833807 | N/A | N/A | 11914 | 11929 | TCTCGAGGGT | 107 | 1677 |
| | | | | | TATTTA | | |
| 833823 | N/A | N/A | 12445 | 12460 | CTGGAGAGGT | 99 | 1678 |
| | | | | | GCGCAA | | |
| 833839 | N/A | N/A | 12886 | 12901 | CAACACTCTC | 113 | 1679 |
| | | | | | AAGGTG | | |
| 833855 | N/A | N/A | 13148 | 13163 | GGCGGATGAG | 71 | 1680 |
| | | | | | CAAACT | | |
| 833871 | N/A | N/A | 13445 | 13460 | CTAAGCTGGT | 79 | 1681 |
| | | | | | TATGGG | | |
| 833887 | N/A | N/A | 14215 | 14230 | GAATTCATAT | 55 | 1682 |
| | | | | | CATCCA | | |
| 833903 | N/A | N/A | 14635 | 14650 | GTGGAGTGTA | 73 | 1683 |
| | | | | | CATTCT | | |
| 833919 | N/A | N/A | 15654 | 15669 | GAGGACTAGA | 96 | 1684 |
| | | | | | GACTCA | | |
| 833935 | N/A | N/A | 16123 | 16138 | GCCTCATAGG | 80 | 1685 |
| | | | | | CCTATA | | |
| 833951 | N/A | N/A | 16598 | 16613 | TGAACTTGGT | 60 | 1686 |
| | | | | | TCAGGG | | |
| 833967 | N/A | N/A | 17542 | 17557 | GTAAATGTGC | 66 | 1687 |
| | | | | | TCGAGT | | |
| 833983 | N/A | N/A | 18201 | 18216 | TTGCATGCAA | 73 | 1688 |
| | | | | | CCCCTT | | |
| 833999* | N/A | N/A | 18998 | 19013 | GTGGATTTGG | 77 | 1689 |
| | | | | | AGCTCG | | |
| 834015* | N/A | N/A | 19306 | 19321 | GGCAGAGAAT | 82 | 1690 |
| | | | | | ACTCTG | | |
| 834031 | N/A | N/A | 20215 | 20230 | TGCCATTCAC | 108 | 1691 |
| | | | | | TGCGCA | | |

TABLE 23
Reduction of SPDEF RNA by 4 μM 3-10-3 cEt
gapmers with a phosphorothioate backbone

| | SEQ | SEQ | SEQ | SEQ | | | |
|---|---|---|---|---|---|---|---|
| | ID | ID | ID | ID | | | |
| | NO: | NO: | NO: | NO: | | | |
| Com- | 1 | 1 | 2 | 2 | | SPDEF | SEQ |
| pound | Start | Stop | Start | Stop | Sequence | (% | ID |
| Number | Site | Site | Site | Site | (5′ to 3′) | UTC) | NO |
| 801690 | 82 | 97 | 1749 | 1764 | CAGCAGGCTT | 71 | 174 |
| | | | | | GGAGGA | | |
| 802055 | N/A | N/A | 12531 | 12546 | CCCCACGGGC | 51 | 387 |
| | | | | | CGCCCC | | |
| 854164 | N/A | N/A | 2089 | 2104 | GCCAGGGTAC | 59 | 1692 |
| | | | | | CCCCAC | | |
| 854170 | N/A | N/A | 2129 | 2144 | TGCAGTCGCC | 61 | 1693 |
| | | | | | CACCCC | | |
| 854176 | N/A | N/A | 2135 | 2150 | CCTGCCTGCA | 60 | 1694 |
| | | | | | GTCGCC | | |
| 854182 | N/A | N/A | 2153 | 2168 | AGTGCGCCCC | 46 | 1695 |
| | | | | | CTCCAA | | |
| 854188 | N/A | N/A | 2160 | 2175 | CTGGCAAAGT | 78 | 1696 |
| | | | | | GCGCCC | | |
| 854194 | N/A | N/A | 2362 | 2377 | ATCTGCACGG | 67 | 1697 |
| | | | | | CGGCCT | | |
| 854200 | N/A | N/A | 3362 | 3377 | CCCACCATTT | 73 | 1698 |
| | | | | | GTCTGT | | |
| 854206 | N/A | N/A | 3380 | 3395 | GGAGCTCCGA | 68 | 1699 |
| | | | | | GAATGC | | |
| 854212 | N/A | N/A | 3680 | 3695 | TTGCACTTCC | 72 | 1700 |
| | | | | | TGCCAG | | |
| 854218 | N/A | N/A | 3689 | 3704 | TCCCGGTTTT | 85 | 1701 |
| | | | | | TGCACT | | |
| 854224 | N/A | N/A | 3695 | 3710 | GGGTTCTCCC | 58 | 1702 |
| | | | | | GGTTTT | | |
| 854230 | N/A | N/A | 3703 | 3718 | TAAAAAGTGG | 71 | 1703 |
| | | | | | GTTCTC | | |
| 854236 | N/A | N/A | 3720 | 3735 | CACAACGACC | 90 | 1704 |
| | | | | | TCAGTG | | |
| 854242 | N/A | N/A | 4486 | 4501 | CAGTGACTCA | 70 | 1705 |
| | | | | | GCCCCC | | |
| 854248 | N/A | N/A | 5764 | 5779 | ACGCCGTACC | 65 | 1706 |
| | | | | | TCCCAG | | |
| 854254 | N/A | N/A | 5772 | 5787 | CCCCGCATAC | 44 | 1707 |
| | | | | | GCCGTA | | |
| 854260 | N/A | N/A | 5808 | 5823 | GCCACAGTAC | 62 | 1708 |
| | | | | | CTTCCC | | |
| 854266 | N/A | N/A | 6298 | 6313 | GAGTTGATGT | 67 | 1709 |
| | | | | | CTGGAG | | |
| 854272 | N/A | N/A | 6304 | 6319 | TCCCTGGAGT | 77 | 1710 |
| | | | | | TGATGT | | |
| 854278 | N/A | N/A | 7384 | 7399 | TCTGGGCACA | 80 | 1711 |
| | | | | | AAACTG | | |
| 854284 | N/A | N/A | 7411 | 7426 | CTAGATCTCC | 58 | 1712 |
| | | | | | GGGCTT | | |
| 854290 | N/A | N/A | 7420 | 7435 | GGGTTTCTTC | 65 | 1713 |
| | | | | | TAGATC | | |
| 854296 | N/A | N/A | 7435 | 7450 | ATGAGTAGAC | 76 | 1714 |
| | | | | | GAGGTG | | |
| 854302 | N/A | N/A | 8811 | 8826 | TGGATTAAGG | 29 | 1715 |
| | | | | | CTCAGC | | |
| 854308 | N/A | N/A | 8820 | 8835 | CCACATGTCT | 82 | 1716 |
| | | | | | GGATTA | | |
| 854313 | N/A | N/A | 8831 | 8846 | TCTGGATTAA | 51 | 1717 |
| | | | | | GCCACA | | |
| 854319 | N/A | N/A | 8845 | 8860 | TCGAGTTGAT | 51 | 1718 |
| | | | | | CTCTTC | | |
| 854325 | N/A | N/A | 8852 | 8867 | CCAAACCTCG | 80 | 1719 |
| | | | | | AGTTGA | | |
| 854331 | N/A | N/A | 9119 | 9134 | TCAGTGATGG | 54 | 1720 |
| | | | | | TCCACC | | |
| 854337 | N/A | N/A | 9147 | 9162 | CATGCAATTC | 48 | 1721 |
| | | | | | AGCCCA | | |
| 854343 | N/A | N/A | 9847 | 9862 | CCCGCTTTCC | 50 | 1722 |
| | | | | | TACCCA | | |
| 854349 | N/A | N/A | 9853 | 9868 | ACATCACCCG | 89 | 1723 |
| | | | | | CTTTCC | | |
| 854355 | N/A | N/A | 9866 | 9881 | CAGGCTTTCA | 48 | 1724 |
| | | | | | CCCACA | | |
| 854361 | N/A | N/A | 9873 | 9888 | CCACGCCCAG | 85 | 1725 |
| | | | | | GCTTTC | | |
| 854367 | N/A | N/A | 9886 | 9901 | GTGAGCACCA | 87 | 1726 |
| | | | | | GTGCCA | | |
| 854373 | N/A | N/A | 9911 | 9926 | AGAACGGCAC | 69 | 1727 |
| | | | | | TGTGAG | | |
| 854379 | N/A | N/A | 9968 | 9983 | CCCAACCTGC | 96 | 1728 |
| | | | | | AACTAG | | |
| 854385 | N/A | N/A | 9979 | 9994 | GGGCTGGTGT | 84 | 1729 |
| | | | | | GCCCAA | | |
| 854391 | N/A | N/A | 10002 | 10017 | TTGGCTTACT | 72 | 1730 |
| | | | | | GGTCAG | | |
| 854397 | N/A | N/A | 10143 | 10158 | GGTCCTAGCT | 68 | 1731 |
| | | | | | CCAACA | | |
| 854403 | N/A | N/A | 10149 | 10164 | AGCCTCGGTC | 80 | 1732 |
| | | | | | CTAGCT | | |
| 854409 | N/A | N/A | 10165 | 10180 | AATCTACTCC | 72 | 1733 |
| | | | | | CCACCA | | |
| 854415 | N/A | N/A | 10171 | 10186 | CCAAGGAATC | 56 | 1734 |
| | | | | | TACTCC | | |
| 854421 | N/A | N/A | 10187 | 10202 | GCCCTATACC | 96 | 1735 |
| | | | | | TAAATG | | |
| 854427 | N/A | N/A | 10193 | 10208 | GACCTTGCCC | 70 | 1736 |
| | | | | | TATACC | | |
| 854433 | N/A | N/A | 11250 | 11265 | TCCCATTCAA | 71 | 1737 |
| | | | | | GGGCTC | | |
| 854439 | N/A | N/A | 11277 | 11292 | GAAGGGTGTT | 98 | 1738 |
| | | | | | CCCTTT | | |
| 854445 | N/A | N/A | 11600 | 11615 | GGCTCCCTGA | 70 | 1739 |
| | | | | | TCCATC | | |
| 854451 | N/A | N/A | 11632 | 11647 | GGTGCCCTAC | 61 | 1740 |
| | | | | | TGGGAC | | |
| 854457 | N/A | N/A | 11638 | 11653 | ATTTATGGTG | 68 | 1741 |
| | | | | | CCCTAC | | |
| 854463 | N/A | N/A | 11654 | 11669 | CCTCTCTAAC | 63 | 1742 |
| | | | | | AGTGAC | | |
| 854469 | N/A | N/A | 12002 | 12017 | GATATACGCT | 71 | 1743 |
| | | | | | CCTAAT | | |
| 854475 | N/A | N/A | 12010 | 12025 | TACCAACAGA | 87 | 1744 |
| | | | | | TATACG | | |
| 854481 | N/A | N/A | 12369 | 12384 | ACATCAAGAC | 57 | 1745 |
| | | | | | AGGCTC | | |
| 854487 | N/A | N/A | 12516 | 12531 | CGGCTTGGTT | 79 | 1746 |
| | | | | | TTGCCC | | |
| 854493 | N/A | N/A | 12522 | 12537 | CCGCCCCGGC | 78 | 1747 |
| | | | | | TTGGTT | | |
| 854499 | N/A | N/A | 12529 | 12544 | CCACGGGCCG | 93 | 1748 |
| | | | | | CCCCGG | | |
| 854505 | N/A | N/A | 12537 | 12552 | CTTGCTCCCC | 79 | 1749 |
| | | | | | ACGGGC | | |
| 854511 | N/A | N/A | 12563 | 12578 | TGGCCTCAAC | 67 | 1750 |
| | | | | | ACAAGC | | |
| 854517 | N/A | N/A | 15700 | 15715 | GACATGGGTC | 72 | 1751 |
| | | | | | AGGACT | | |
| 854523 | N/A | N/A | 15747 | 15762 | AAGCTGCACA | 100 | 1752 |
| | | | | | GAGTTC | | |
| 854529 | N/A | N/A | 17294 | 17309 | TCCACGGTTG | 57 | 1753 |
| | | | | | TCCCCA | | |
| 854535 | N/A | N/A | 17303 | 17318 | TTCCTAGTAT | 45 | 1754 |
| | | | | | CCACGG | | |
| 854541 | N/A | N/A | 17309 | 17324 | AAGGACTTCC | 85 | 1755 |
| | | | | | TAGTAT | | |
| 854547 | N/A | N/A | 17531 | 17546 | CGAGTATTCA | 30 | 1756 |
| | | | | | TAGACT | | |
| 854553 | N/A | N/A | 17539 | 17554 | AATGTGCTCG | 65 | 1757 |
| | | | | | AGTATT | | |
| 854559 | N/A | N/A | 18097 | 18112 | CTTACTCCTT | 53 | 1758 |
| | | | | | GACTCA | | |
| 854565 | N/A | N/A | 18115 | 18130 | TATGAGTTGG | 77 | 1759 |
| | | | | | TCCTGT | | |
| 854571 | N/A | N/A | 18122 | 18137 | AGGGTCCTAT | 71 | 1760 |
| | | | | | GAGTTG | | |
| 854577 | N/A | N/A | 18133 | 18148 | TGGTCTCTGA | 47 | 1761 |
| | | | | | CAGGGT | | |
| 854583 | N/A | N/A | 18435 | 18450 | TCATCCAGGC | 72 | 1762 |
| | | | | | CGCTGC | | |
| 854589 | N/A | N/A | 18496 | 18511 | TCCACCCTGC | 45 | 1763 |
| | | | | | CGCTGC | | |
| 854595 | N/A | N/A | 18537 | 18552 | TTCATTGGCA | 83 | 1764 |
| | | | | | GCCACC | | |
| 854601 | N/A | N/A | 18544 | 18559 | TCCCGGCTTC | 75 | 1765 |
| | | | | | ATTGGC | | |
| 854607 | N/A | N/A | 18550 | 18565 | GGCCAGTCCC | 73 | 1766 |
| | | | | | GGCTTC | | |
| 854613 | N/A | N/A | 20209 | 20224 | TCACTGCGCA | 79 | 1767 |
| | | | | | GACACT | | |

TABLE 24
Reduction of SPDEF RNA by 4 μM 3-10-3 cEt
gapmers with a phosphorothioate backbone

| | SEQ | SEQ | SEQ | SEQ | | | |
|---|---|---|---|---|---|---|---|
| | ID | ID | ID | ID | | | |
| | NO: | NO: | NO: | NO: | | SPD | |
| Com- | 1 | 1 | 2 | 2 | Sequence | EF | SEQ |
| pound | Start | Stop | Start | Stop | (5′ to | (% | ID |
| Number | Site | Site | Site | Site | 3′) | UTC) | NO |
| 652636 | N/A | N/A | 8821 | 8836 | GCCACATG | 65 | 1768 |
| | | | | | TCTGGATT | | |
| 801690 | 82 | 97 | 1749 | 1764 | CAGCAGGC | 81 | 174 |
| | | | | | TTGGAGGA | | |
| 802055 | N/A | N/A | 12531 | 12546 | CCCCACGG | 73 | 387 |
| | | | | | GCCGCCCC | | |
| 854165 | N/A | N/A | 2091 | 2106 | ATGCCAGG | 84 | 1769 |
| | | | | | GTACCCCC | | |
| 854171 | N/A | N/A | 2130 | 2145 | CTGCAGTC | 69 | 1770 |
| | | | | | GCCCACCC | | |
| 854177 | N/A | N/A | 2148 | 2163 | GCCCCCTC | 71 | 1771 |
| | | | | | CAAGTCCT | | |
| 854183 | N/A | N/A | 2154 | 2169 | AAGTGCGC | 46 | 1772 |
| | | | | | CCCCTCCA | | |
| 854189 | N/A | N/A | 2354 | 2369 | GGCGGCCT | 69 | 1773 |
| | | | | | CCCCTCAG | | |
| 854195 | N/A | N/A | 2363 | 2378 | CATCTGCA | 73 | 1774 |
| | | | | | CGGCGGCC | | |
| 854201 | N/A | N/A | 3363 | 3378 | CCCCACCA | 78 | 1775 |
| | | | | | TTTGTCTG | | |
| 854207 | N/A | N/A | 3381 | 3396 | GGGAGCTC | 99 | 1776 |
| | | | | | CGAGAATG | | |
| 854213 | N/A | N/A | 3684 | 3699 | GTTTTTGC | 55 | 1777 |
| | | | | | ACTTCCTG | | |
| 854219 | N/A | N/A | 3690 | 3705 | CTCCCGGT | 80 | 1778 |
| | | | | | TTTTGCAC | | |
| 854225 | N/A | N/A | 3696 | 3711 | TGGGTTCT | 95 | 1779 |
| | | | | | CCCGGTTT | | |
| 854231 | N/A | N/A | 3704 | 3719 | GTAAAAAG | 76 | 1780 |
| | | | | | GTGGTTCT | | |
| 854237 | N/A | N/A | 3721 | 3736 | TCACAACG | 68 | 1781 |
| | | | | | ACCTCAGT | | |
| 854243 | N/A | N/A | 5758 | 5773 | TACCTCCC | 77 | 1782 |
| | | | | | AGCTTGCC | | |
| 854249 | N/A | N/A | 5765 | 5780 | TACGCCGT | 69 | 1783 |
| | | | | | ACCTCCCA | | |
| 854255 | N/A | N/A | 5774 | 5789 | AGCCCCGC | 36 | 1784 |
| | | | | | ATACGCCG | | |
| 854261 | N/A | N/A | 5809 | 5824 | GGCCACAG | 69 | 1785 |
| | | | | | TACCTTCC | | |
| 854267 | N/A | N/A | 6299 | 6314 | GGAGTTGA | 109 | 1786 |
| | | | | | TGTCTGGA | | |
| 854273 | N/A | N/A | 6305 | 6320 | GTCCCTGG | 91 | 1787 |
| | | | | | AGTTGATG | | |
| 854279 | N/A | N/A | 7404 | 7419 | TCCGGGCT | 75 | 1788 |
| | | | | | TTCCCCAC | | |
| 854285 | N/A | N/A | 7412 | 7427 | TCTAGATC | 55 | 1789 |
| | | | | | TCCGGGCT | | |
| 854291 | N/A | N/A | 7426 | 7441 | CGAGGTGG | 74 | 1790 |
| | | | | | GTTTCTTC | | |
| 854297 | N/A | N/A | 7436 | 7451 | CATGAGTA | 76 | 1791 |
| | | | | | GACGAGGT | | |
| 854303 | N/A | N/A | 8813 | 8828 | TCTGGATT | 49 | 1792 |
| | | | | | AAGGCTCA | | |
| 854314 | N/A | N/A | 8832 | 8847 | TTCTGGAT | 53 | 1793 |
| | | | | | TAAGCCAC | | |
| 854320 | N/A | N/A | 8847 | 8862 | CCTCGAGT | 56 | 1794 |
| | | | | | TGATCTCT | | |
| 854326 | N/A | N/A | 8854 | 8869 | TCCCAAAC | 81 | 1795 |
| | | | | | CTCGAGTT | | |
| 854332 | N/A | N/A | 9120 | 9135 | ATCAGTGA | 71 | 1796 |
| | | | | | TGGTCCAC | | |
| 854338 | N/A | N/A | 9151 | 9166 | GTGCCATG | 47 | 1797 |
| | | | | | CAATTCAG | | |
| 854344 | N/A | N/A | 9848 | 9863 | ACCCGCTT | 63 | 1798 |
| | | | | | TCCTACCC | | |
| 854350 | N/A | N/A | 9854 | 9869 | CACATCAC | 86 | 1799 |
| | | | | | CCGCTTTC | | |
| 854356 | N/A | N/A | 9867 | 9882 | CCAGGCTT | 66 | 1800 |
| | | | | | TCACCCAC | | |
| 854362 | N/A | N/A | 9876 | 9891 | GTGCCACG | 86 | 1801 |
| | | | | | CCCAGGCT | | |
| 854368 | N/A | N/A | 9887 | 9902 | AGTGAGCA | 89 | 1802 |
| | | | | | CCAGTGCC | | |
| 854374 | N/A | N/A | 9913 | 9928 | AGAGAACG | 72 | 1803 |
| | | | | | GCACTGTG | | |
| 854380 | N/A | N/A | 9970 | 9985 | TGCCCAAC | 97 | 1804 |
| | | | | | CTGCAACT | | |
| 854386 | N/A | N/A | 9980 | 9995 | AGGGCTGG | 92 | 1805 |
| | | | | | TGTGCCCA | | |
| 854392 | N/A | N/A | 10003 | 10018 | CTTGGCTT | 70 | 1806 |
| | | | | | ACTGGTCA | | |
| 854398 | N/A | N/A | 10144 | 10159 | CGGTCCTA | 48 | 1807 |
| | | | | | GCTCCAAC | | |
| 854404 | N/A | N/A | 10150 | 10165 | AAGCCTCG | 64 | 1808 |
| | | | | | GTCCTAGC | | |
| 854410 | N/A | N/A | 10166 | 10181 | GAATCTAC | 74 | 1809 |
| | | | | | TCCCCACC | | |
| 854416 | N/A | N/A | 10173 | 10188 | TGCCAAGG | 64 | 1810 |
| | | | | | AATCTACT | | |
| 854422 | N/A | N/A | 10188 | 10203 | TGCCCTAT | 88 | 1811 |
| | | | | | ACCTAAAT | | |
| 854428 | N/A | N/A | 11238 | 11253 | GCTCCTTT | 87 | 1812 |
| | | | | | AAGTGACA | | |
| 854434 | N/A | N/A | 11251 | 11266 | CTCCCATT | 82 | 1813 |
| | | | | | CAAGGGCT | | |
| 854440 | N/A | N/A | 11278 | 11293 | GGAAGGGT | 109 | 1814 |
| | | | | | GTTCCCTT | | |
| 854446 | N/A | N/A | 11601 | 11616 | GGGCTCCC | 80 | 1815 |
| | | | | | TGATCCAT | | |
| 854452 | N/A | N/A | 11633 | 11648 | TGGTGCCC | 45 | 1816 |
| | | | | | TACTGGGA | | |
| 854458 | N/A | N/A | 11639 | 11654 | CATTTATG | 49 | 1817 |
| | | | | | GTGCCCTA | | |
| 854464 | N/A | N/A | 11655 | 11670 | TCCTCTCT | 98 | 1818 |
| | | | | | AACAGTGA | | |
| 854470 | N/A | N/A | 12003 | 12018 | AGATATAC | 67 | 1819 |
| | | | | | GCTCCTAA | | |
| 854476 | N/A | N/A | 12017 | 12032 | AGAAGATT | 56 | 1820 |
| | | | | | ACCAACAG | | |
| 854482 | N/A | N/A | 12370 | 12385 | TACATCAA | 53 | 1821 |
| | | | | | GACAGGCT | | |
| 854488 | N/A | N/A | 12517 | 12532 | CCGGCTTG | 78 | 1822 |
| | | | | | GTTTTGCC | | |
| 854494 | N/A | N/A | 12523 | 12538 | GCCGCCCC | 91 | 1823 |
| | | | | | GGCTTGGT | | |
| 854500 | N/A | N/A | 12530 | 12545 | CCCACGGG | 64 | 1824 |
| | | | | | CCGCCCCG | | |
| 854506 | N/A | N/A | 12538 | 12553 | CCTTGCTC | 71 | 1825 |
| | | | | | CCCACGGG | | |
| 854512 | N/A | N/A | 12564 | 12579 | CTGGCCTC | 67 | 1826 |
| | | | | | AACACAAG | | |
| 854518 | N/A | N/A | 15732 | 15747 | CAGTGCTG | 106 | 1827 |
| | | | | | CAATGCCA | | |
| 854524 | N/A | N/A | 17265 | 17280 | GCATCCTC | 53 | 1828 |
| | | | | | ACAGTCTG | | |
| 854530 | N/A | N/A | 17296 | 17311 | TATCCACG | 60 | 1829 |
| | | | | | GTTGTCCC | | |
| 854536 | N/A | N/A | 17304 | 17319 | CTTCCTAG | 56 | 1830 |
| | | | | | TATCCACG | | |
| 854542 | N/A | N/A | 17490 | 17505 | TTGTAACA | 55 | 1831 |
| | | | | | GTGGTTCC | | |
| 854548 | N/A | N/A | 17532 | 17547 | TCGAGTAT | 56 | 1832 |
| | | | | | TCATAGAC | | |
| 854554 | N/A | N/A | 17540 | 17555 | AAATGTGC | 72 | 1833 |
| | | | | | TCGAGTAT | | |
| 854560 | N/A | N/A | 18098 | 18113 | TCTTACTC | 72 | 1834 |
| | | | | | CTTGACTC | | |
| 854566 | N/A | N/A | 18116 | 18131 | CTATGAGT | 87 | 1835 |
| | | | | | TGGTCCTG | | |
| 854572 | N/A | N/A | 18123 | 18138 | CAGGGTCC | 68 | 1836 |
| | | | | | TATGAGTT | | |
| 854578 | N/A | N/A | 18134 | 18149 | CTGGTCTC | 71 | 1837 |
| | | | | | TGACAGGG | | |
| 854584 | N/A | N/A | 18473 | 18488 | ACCACAGT | 110 | 1838 |
| | | | | | AGTGAATC | | |
| 854590 | N/A | N/A | 18498 | 18513 | CCTCCACC | 92 | 1839 |
| | | | | | CTGCCGCT | | |
| 854596 | N/A | N/A | 18539 | 18554 | GCTTCATT | 104 | 1840 |
| | | | | | GGCAGCCA | | |
| 854602 | N/A | N/A | 18545 | 18560 | GTCCCGGC | 103 | 1841 |
| | | | | | TTCATTGG | | |
| 854608 | N/A | N/A | 20185 | 20200 | GTCAGTTC | 45 | 1842 |
| | | | | | TCTAGTAT | | |
| 854614 | N/A | N/A | 20210 | 20225 | TTCACTGC | 73 | 1843 |
| | | | | | GCAGACAC | | |

TABLE 25
Reduction of SPDEF RNA by 4 μM 3-10-3 cEt
gapmers with a phosphorothioate backbone

| | SEQ | SEQ | SEQ | SEQ | | | |
|---|---|---|---|---|---|---|---|
| | ID | ID | ID | ID | | | |
| | NO: | NO: | NO: | NO: | | | |
| Com- | 1 | 1 | 2 | 2 | Sequence | SPDEF | SEQ |
| pound | Start | Stop | Start | Stop | (5′ to | (% | ID |
| Number | Site | Site | Site | Site | 3′) | UTC) | NO |
| 801690 | 82 | 97 | 1749 | 1764 | CAGCAGGC | 87 | 174 |
| | | | | | TTGGAGGA | | |
| 802055 | N/A | N/A | 12531 | 12546 | CCCCACGG | 66 | 387 |
| | | | | | GCCGCCCC | | |
| 854166 | N/A | N/A | 2092 | 2107 | CATGCCAG | 103 | 1844 |
| | | | | | GGTACCCC | | |
| 854172 | N/A | N/A | 2131 | 2146 | CCTGCAGT | 66 | 1845 |
| | | | | | CGCCCACC | | |
| 854178 | N/A | N/A | 2149 | 2164 | CGCCCCCT | 75 | 1846 |
| | | | | | CCAAGTCC | | |
| 854184 | N/A | N/A | 2155 | 2170 | AAAGTGCG | 61 | 1847 |
| | | | | | CCCCCTCC | | |
| 854190 | N/A | N/A | 2356 | 2371 | ACGGCGGC | 62 | 1848 |
| | | | | | CTCCCCTC | | |
| 854196 | N/A | N/A | 2364 | 2379 | GCATCTGC | 44 | 1849 |
| | | | | | ACGGCGGC | | |
| 854202 | N/A | N/A | 3372 | 3387 | GAGAATGC | 73 | 1850 |
| | | | | | CCCCCACC | | |
| 854208 | N/A | N/A | 3382 | 3397 | TGGGAGCT | 106 | 1851 |
| | | | | | CCGAGAAT | | |
| 854214 | N/A | N/A | 3685 | 3700 | GGTTTTTG | 51 | 1852 |
| | | | | | CACTTCCT | | |
| 854220 | N/A | N/A | 3691 | 3706 | TCTCCCGG | 80 | 1853 |
| | | | | | TTTTTGCA | | |
| 854226 | N/A | N/A | 3698 | 3713 | AGTGGGTT | 40 | 1854 |
| | | | | | CTCCCGGT | | |
| 854232 | N/A | N/A | 3715 | 3730 | CGACCTCA | 66 | 1855 |
| | | | | | GTGGTAAA | | |
| 854238 | N/A | N/A | 3723 | 3738 | ACTCACAA | 80 | 1856 |
| | | | | | CGACCTCA | | |
| 854244 | N/A | N/A | 5759 | 5774 | GTACCTCC | 94 | 1857 |
| | | | | | CAGCTTGC | | |
| 854250 | N/A | N/A | 5766 | 5781 | ATACGCCG | 65 | 1858 |
| | | | | | TACCTCCC | | |
| 854256 | N/A | N/A | 5775 | 5790 | CAGCCCCG | 63 | 1859 |
| | | | | | CATACGCC | | |
| 854262 | N/A | N/A | 6294 | 6309 | TGATGTCT | 66 | 1860 |
| | | | | | GGAGGCTC | | |
| 854268 | N/A | N/A | 6300 | 6315 | TGGAGTTG | 82 | 1861 |
| | | | | | ATGTCTGG | | |
| 854274 | N/A | N/A | 6306 | 6321 | TGTCCCTG | 110 | 1862 |
| | | | | | GAGTTGAT | | |
| 854280 | N/A | N/A | 7405 | 7420 | CTCCGGGC | 57 | 1863 |
| | | | | | TTTCCCCA | | |
| 854286 | N/A | N/A | 7413 | 7428 | TTCTAGAT | 83 | 1864 |
| | | | | | CTCCGGGC | | |
| 854292 | N/A | N/A | 7427 | 7442 | ACGAGGTG | 102 | 1865 |
| | | | | | GGTTTCTT | | |
| 854298 | N/A | N/A | 7438 | 7453 | AGCATGAG | 65 | 1866 |
| | | | | | TAGACGAG | | |
| 854304 | N/A | N/A | 8814 | 8829 | GTCTGGAT | 62 | 1867 |
| | | | | | TAAGGCTC | | |
| 854309 | N/A | N/A | 8822 | 8837 | AGCCACAT | 95 | 1868 |
| | | | | | GTCTGGAT | | |
| 854315 | N/A | N/A | 8840 | 8855 | TTGATCTC | 78 | 1869 |
| | | | | | TTCTGGAT | | |
| 854321 | N/A | N/A | 8848 | 8863 | ACCTCGAG | 62 | 1870 |
| | | | | | TTGATCTC | | |
| 854327 | N/A | N/A | 9113 | 9128 | ATGGTCCA | 99 | 1871 |
| | | | | | CCCATGGG | | |
| 854333 | N/A | N/A | 9121 | 9136 | CATCAGTG | 85 | 1872 |
| | | | | | ATGGTCCA | | |
| 854339 | N/A | N/A | 9152 | 9167 | TGTGCCAT | 56 | 1873 |
| | | | | | GCAATTCA | | |
| 854345 | N/A | N/A | 9849 | 9864 | CACCCGCT | 97 | 1874 |
| | | | | | TTCCTACC | | |
| 854351 | N/A | N/A | 9856 | 9871 | CCCACATC | 83 | 1875 |
| | | | | | ACCCGCTT | | |
| 854357 | N/A | N/A | 9869 | 9884 | GCCCAGGC | 107 | 1876 |
| | | | | | TTTCACCC | | |
| 854363 | N/A | N/A | 9880 | 9895 | ACCAGTGC | 56 | 1877 |
| | | | | | CACGCCCA | | |
| 854369 | N/A | N/A | 9888 | 9903 | CAGTGAGC | 75 | 1878 |
| | | | | | ACCAGTGC | | |
| 854375 | N/A | N/A | 9947 | 9962 | TCAAGGTT | 85 | 1879 |
| | | | | | CTGGGCTG | | |
| 854381 | N/A | N/A | 9975 | 9990 | TGGTGTGC | 109 | 1880 |
| | | | | | CCAACCTG | | |
| 854387 | N/A | N/A | 9997 | 10012 | TTACTGGT | 71 | 1881 |
| | | | | | CAGGCAGC | | |
| 854393 | N/A | N/A | 10004 | 10019 | GCTTGGCT | 51 | 1882 |
| | | | | | TACTGGTC | | |
| 854399 | N/A | N/A | 10145 | 10160 | TCGGTCCT | 67 | 1883 |
| | | | | | AGCTCCAA | | |
| 854405 | N/A | N/A | 10151 | 10166 | CAAGCCTC | 64 | 1884 |
| | | | | | GGTCCTAG | | |
| 854411 | N/A | N/A | 10167 | 10182 | GGAATCTA | 78 | 1885 |
| | | | | | CTCCCCAC | | |
| 854417 | N/A | N/A | 10181 | 10196 | TACCTAAA | 81 | 1886 |
| | | | | | TGCCAAGG | | |
| 854423 | N/A | N/A | 10189 | 10204 | TTGCCCTA | 82 | 1887 |
| | | | | | TACCTAAA | | |
| 854429 | N/A | N/A | 11239 | 11254 | GGCTCCTT | 120 | 1888 |
| | | | | | TAAGTGAC | | |
| 854435 | N/A | N/A | 11252 | 11267 | TCTCCCAT | 108 | 1889 |
| | | | | | TCAAGGGC | | |
| 854441 | N/A | N/A | 11593 | 11608 | TGATCCAT | 101 | 1890 |
| | | | | | CTCCAGTT | | |
| 854447 | N/A | N/A | 11627 | 11642 | CCTACTGG | 63 | 1891 |
| | | | | | GACAGCAG | | |
| 854453 | N/A | N/A | 11634 | 11649 | ATGGTGCC | 47 | 1892 |
| | | | | | CTACTGGG | | |
| 854459 | N/A | N/A | 11641 | 11656 | GACATTTA | 34 | 1893 |
| | | | | | TGGTGCCC | | |
| 854465 | N/A | N/A | 11997 | 12012 | ACGCTCCT | 91 | 1894 |
| | | | | | AATAATAC | | |
| 854471 | N/A | N/A | 12004 | 12019 | CAGATATA | 50 | 1895 |
| | | | | | CGCTCCTA | | |
| 854477 | N/A | N/A | 12018 | 12033 | CAGAAGAT | 69 | 1896 |
| | | | | | TACCAACA | | |
| 854483 | N/A | N/A | 12388 | 12403 | GGGCCTGA | 109 | 1897 |
| | | | | | GACTTAAG | | |
| 854489 | N/A | N/A | 12518 | 12533 | CCCGGCTT | 90 | 1898 |
| | | | | | GGTTTTGC | | |
| 854495 | N/A | N/A | 12525 | 12540 | GGGCCGCC | 103 | 1899 |
| | | | | | CCGGCTTG | | |
| 854501 | N/A | N/A | 12532 | 12547 | TCCCCACG | 60 | 1900 |
| | | | | | GGCCGCCC | | |
| 854507 | N/A | N/A | 12539 | 12554 | GCCTTGCT | 108 | 1901 |
| | | | | | CCCCACGG | | |
| 854513 | N/A | N/A | 12567 | 12582 | CATCTGGC | 109 | 1902 |
| | | | | | CTCAACAC | | |
| 854519 | N/A | N/A | 15733 | 15748 | TCAGTGCT | 53 | 1903 |
| | | | | | GCAATGCC | | |
| 854525 | N/A | N/A | 17275 | 17290 | CTGACATC | 94 | 1904 |
| | | | | | CTGCATCC | | |
| 854531 | N/A | N/A | 17298 | 17313 | AGTATCCA | 58 | 1905 |
| | | | | | CGGTTGTC | | |
| 854537 | N/A | N/A | 17305 | 17320 | ACTTCCTA | 55 | 1906 |
| | | | | | GTATCCAC | | |
| 854543 | N/A | N/A | 17491 | 17506 | CTTGTAAC | 61 | 1907 |
| | | | | | AGTGGTTC | | |
| 854549 | N/A | N/A | 17534 | 17549 | GCTCGAGT | 68 | 1908 |
| | | | | | ATTCATAG | | |
| 854555 | N/A | N/A | 17541 | 17556 | TAAATGTG | 79 | 1909 |
| | | | | | CTCGAGTA | | |
| 854561 | N/A | N/A | 18099 | 18114 | TTCTTACT | 78 | 1910 |
| | | | | | CCTTGACT | | |
| 854567 | N/A | N/A | 18117 | 18132 | CCTATGAG | 74 | 1911 |
| | | | | | TTGGTCCT | | |
| 854573 | N/A | N/A | 18124 | 18139 | ACAGGGTC | 81 | 1912 |
| | | | | | CTATGAGT | | |
| 854579 | N/A | N/A | 18135 | 18150 | ACTGGTCT | 72 | 1913 |
| | | | | | CTGACAGG | | |
| 854585 | N/A | N/A | 18474 | 18489 | CACCACAG | 110 | 1914 |
| | | | | | TAGTGAAT | | |
| 854591 | N/A | N/A | 18513 | 18528 | CCACCCGA | 72 | 1915 |
| | | | | | GCCCCCGC | | |
| 854597 | N/A | N/A | 18540 | 18555 | GGCTTCAT | 102 | 1916 |
| | | | | | TGGCAGCC | | |
| 854603 | N/A | N/A | 18546 | 18561 | AGTCCCGG | 109 | 1917 |
| | | | | | CTTCATTG | | |
| 854609 | N/A | N/A | 20186 | 20201 | TGTCAGTT | 82 | 1918 |
| | | | | | CTCTAGTA | | |
| 854615 | N/A | N/A | 20212 | 20227 | CATTCACT | 83 | 1919 |
| | | | | | GCGCAGAC | | |

TABLE 26
Reduction of SPDEF RNA by 4 μM 3-10-3 cEt
gapmers with a phosphorothioate backbone

| | SEQ | SEQ | SEQ | SEQ | | | |
|---|---|---|---|---|---|---|---|
| | ID | ID | ID | ID | | | |
| | NO: | NO: | NO: | NO: | | | |
| Com- | 1 | 1 | 2 | 2 | Sequence | SPDEF | SEQ |
| pound | Start | Stop | Start | Stop | (5′ to | (% | ID |
| Number | Site | Site | Site | Site | 3′) | UTC) | NO |
| 801690 | 82 | 97 | 1749 | 1764 | CAGCAGGC | 95 | 174 |
| | | | | | TTGGAGGA | | |
| 802055 | N/A | N/A | 12531 | 12546 | CCCCACGG | 63 | 387 |
| | | | | | GCCGCCCC | | |
| 854167 | N/A | N/A | 2093 | 2108 | CCATGCCA | 81 | 1920 |
| | | | | | GGGTACCC | | |
| 854173 | N/A | N/A | 2132 | 2147 | GCCTGCAG | 78 | 1921 |
| | | | | | TCGCCCAC | | |
| 854179 | N/A | N/A | 2150 | 2165 | GCGCCCCC | 100 | 1922 |
| | | | | | TCCAAGTC | | |
| 854185 | N/A | N/A | 2156 | 2171 | CAAAGTGC | 78 | 1923 |
| | | | | | GCCCCCTC | | |
| 854191 | N/A | N/A | 2357 | 2372 | CACGGCGG | 62 | 1924 |
| | | | | | CCTCCCCT | | |
| 854197 | N/A | N/A | 2367 | 2382 | TCTGCATC | 69 | 1925 |
| | | | | | TGCACGGC | | |
| 854203 | N/A | N/A | 3377 | 3392 | GCTCCGAG | 94 | 1926 |
| | | | | | AATGCCCC | | |
| 854209 | N/A | N/A | 3383 | 3398 | CTGGGAGC | 92 | 1927 |
| | | | | | TCCGAGAA | | |
| 854215 | N/A | N/A | 3686 | 3701 | CGGTTTTT | 32 | 1928 |
| | | | | | GCACTTCC | | |
| 854221 | N/A | N/A | 3692 | 3707 | TTCTCCCG | 90 | 1929 |
| | | | | | GTTTTTGC | | |
| 854227 | N/A | N/A | 3699 | 3714 | AAGTGGGT | 51 | 1930 |
| | | | | | TCTCCCGG | | |
| 854233 | N/A | N/A | 3716 | 3731 | ACGACCTC | 56 | 1931 |
| | | | | | AGTGGTAA | | |
| 854239 | N/A | N/A | 3724 | 3739 | TACTCACA | 69 | 1932 |
| | | | | | ACGACCTC | | |
| 854245 | N/A | N/A | 5760 | 5775 | CGTACCTC | 90 | 1933 |
| | | | | | CCAGCTTG | | |
| 854251 | N/A | N/A | 5767 | 5782 | CATACGCC | 91 | 1934 |
| | | | | | GTACCTCC | | |
| 854257 | N/A | N/A | 5776 | 5791 | CCAGCCCC | 75 | 1935 |
| | | | | | GCATACGC | | |
| 854263 | N/A | N/A | 6295 | 6310 | TTGATGTC | 79 | 1936 |
| | | | | | TGGAGGCT | | |
| 854269 | N/A | N/A | 6301 | 6316 | CTGGAGTT | 88 | 1937 |
| | | | | | GATGTCTG | | |
| 854275 | N/A | N/A | 7372 | 7387 | ACTGTCCA | 68 | 1938 |
| | | | | | GGCCAACT | | |
| 854281 | N/A | N/A | 7407 | 7422 | ATCTCCGG | 75 | 1939 |
| | | | | | GCTTTCCC | | |
| 854287 | N/A | N/A | 7414 | 7429 | CTTCTAGA | 87 | 1940 |
| | | | | | TCTCCGGG | | |
| 854293 | N/A | N/A | 7429 | 7444 | AGACGAGG | 104 | 1941 |
| | | | | | TGGGTTTC | | |
| 854299 | N/A | N/A | 7440 | 7455 | TCAGCATG | 90 | 1942 |
| | | | | | AGTAGACG | | |
| 854305 | N/A | N/A | 8815 | 8830 | TGTCTGGA | 89 | 1943 |
| | | | | | TTAAGGCT | | |
| 854310 | N/A | N/A | 8827 | 8842 | GATTAAGC | 77 | 1944 |
| | | | | | CACATGTC | | |
| 854316 | N/A | N/A | 8841 | 8856 | GTTGATCT | 59 | 1945 |
| | | | | | CTTCTGGA | | |
| 854322 | N/A | N/A | 8849 | 8864 | AACCTCGA | 99 | 1946 |
| | | | | | GTTGATCT | | |
| 854328 | N/A | N/A | 9114 | 9129 | GATGGTCC | 84 | 1947 |
| | | | | | ACCCATGG | | |
| 854334 | N/A | N/A | 9122 | 9137 | CCATCAGT | 78 | 1948 |
| | | | | | GATGGTCC | | |
| 854340 | N/A | N/A | 9153 | 9168 | CTGTGCCA | 53 | 1949 |
| | | | | | TGCAATTC | | |
| 854346 | N/A | N/A | 9850 | 9865 | TCACCCGC | 80 | 1950 |
| | | | | | TTTCCTAC | | |
| 854352 | N/A | N/A | 9857 | 9872 | ACCCACAT | 84 | 1951 |
| | | | | | CACCCGCT | | |
| 854358 | N/A | N/A | 9870 | 9885 | CGCCCAGG | 81 | 1952 |
| | | | | | CTTTCACC | | |
| 854364 | N/A | N/A | 9882 | 9897 | GCACCAGT | 95 | 1953 |
| | | | | | GCCACGCC | | |
| 854370 | N/A | N/A | 9908 | 9923 | ACGGCACT | 95 | 1954 |
| | | | | | GTGAGCCC | | |
| 854376 | N/A | N/A | 9965 | 9980 | AACCTGCA | 50 | 1955 |
| | | | | | ACTAGGCG | | |
| 854382 | N/A | N/A | 9976 | 9991 | CTGGTGTG | 96 | 1956 |
| | | | | | CCCAACCT | | |
| 854388 | N/A | N/A | 9998 | 10013 | CTTACTGG | 77 | 1957 |
| | | | | | TCAGGCAG | | |
| 854394 | N/A | N/A | 10005 | 10020 | GGCTTGGC | 67 | 1958 |
| | | | | | TTACTGGT | | |
| 854400 | N/A | N/A | 10146 | 10161 | CTCGGTCC | 69 | 1959 |
| | | | | | TAGCTCCA | | |
| 854406 | N/A | N/A | 10152 | 10167 | CCAAGCCT | 69 | 1960 |
| | | | | | CGGTCCTA | | |
| 854412 | N/A | N/A | 10168 | 10183 | AGGAATCT | 84 | 1961 |
| | | | | | ACTCCCCA | | |
| 854418 | N/A | N/A | 10182 | 10197 | ATACCTAA | 90 | 1962 |
| | | | | | ATGCCAAG | | |
| 854424 | N/A | N/A | 10190 | 10205 | CTTGCCCT | 84 | 1963 |
| | | | | | ATACCTAA | | |
| 854430 | N/A | N/A | 11240 | 11255 | GGGCTCCT | 96 | 1964 |
| | | | | | TTAAGTGA | | |
| 854436 | N/A | N/A | 11274 | 11289 | GGGTGTTC | 86 | 1965 |
| | | | | | CCTTTGAT | | |
| 854442 | N/A | N/A | 11594 | 11609 | CTGATCCA | 102 | 1966 |
| | | | | | TCTCCAGT | | |
| 854448 | N/A | N/A | 11629 | 11644 | GCCCTACT | 77 | 1967 |
| | | | | | GGGACAGC | | |
| 854454 | N/A | N/A | 11635 | 11650 | TATGGTGC | 67 | 1968 |
| | | | | | CCTACTGG | | |
| 854460 | N/A | N/A | 11643 | 11658 | GTGACATT | 65 | 1969 |
| | | | | | TATGGTGC | | |
| 854466 | N/A | N/A | 11999 | 12014 | ATACGCTC | 102 | 1970 |
| | | | | | CTAATAAT | | |
| 854472 | N/A | N/A | 12006 | 12021 | AACAGATA | 47 | 1971 |
| | | | | | TACGCTCC | | |
| 854478 | N/A | N/A | 12020 | 12035 | GGCAGAAG | 72 | 1972 |
| | | | | | ATTACCAA | | |
| 854484 | N/A | N/A | 12500 | 12515 | AGGCCCTT | 98 | 1973 |
| | | | | | TTCCCTGA | | |
| 854490 | N/A | N/A | 12519 | 12534 | CCCCGGCT | 87 | 1974 |
| | | | | | TGGTTTTG | | |
| 854496 | N/A | N/A | 12526 | 12541 | CGGGCCGC | 83 | 1975 |
| | | | | | CCCGGCTT | | |
| 854502 | N/A | N/A | 12534 | 12549 | GCTCCCCA | 65 | 1976 |
| | | | | | CGGGCCGC | | |
| 854508 | N/A | N/A | 12548 | 12563 | CAGTCAGA | 86 | 1977 |
| | | | | | GGCCTTGC | | |
| 854514 | N/A | N/A | 15697 | 15712 | ATGGGTCA | 84 | 1978 |
| | | | | | GGACTGCC | | |
| 854520 | N/A | N/A | 15734 | 15749 | TTCAGTGC | 71 | 1979 |
| | | | | | TGCAATGC | | |
| 854526 | N/A | N/A | 17289 | 17304 | GGTTGTCC | 50 | 1980 |
| | | | | | CCAGCTCT | | |
| 854532 | N/A | N/A | 17299 | 17314 | TAGTATCC | 84 | 1981 |
| | | | | | ACGGTTGT | | |
| 854538 | N/A | N/A | 17306 | 17321 | GACTTCCT | 45 | 1982 |
| | | | | | AGTATCCA | | |
| 854544 | N/A | N/A | 17492 | 17507 | ACTTGTAA | 46 | 1983 |
| | | | | | CAGTGGTT | | |
| 854550 | N/A | N/A | 17536 | 17551 | GTGCTCGA | 59 | 1984 |
| | | | | | GTATTCAT | | |
| 854556 | N/A | N/A | 17543 | 17558 | TGTAAATG | 65 | 1985 |
| | | | | | TGCTCGAG | | |
| 854562 | N/A | N/A | 18112 | 18127 | GAGTTGGT | 88 | 1986 |
| | | | | | CCTGTTTC | | |
| 854568 | N/A | N/A | 18119 | 18134 | GTCCTATG | 93 | 1987 |
| | | | | | AGTTGGTC | | |
| 854574 | N/A | N/A | 18125 | 18140 | GACAGGGT | 85 | 1988 |
| | | | | | CCTATGAG | | |
| 854580 | N/A | N/A | 18136 | 18151 | CACTGGTC | 79 | 1989 |
| | | | | | TCTGACAG | | |
| 854586 | N/A | N/A | 18475 | 18490 | TCACCACA | 121 | 1990 |
| | | | | | GTAGTGAA | | |
| 854592 | N/A | N/A | 18534 | 18549 | ATTGGCAG | 106 | 1991 |
| | | | | | CCACCCCT | | |
| 854598 | N/A | N/A | 18541 | 18556 | CGGCTTCA | 105 | 1992 |
| | | | | | TTGGCAGC | | |
| 854604 | N/A | N/A | 18547 | 18562 | CAGTCCCG | 115 | 1993 |
| | | | | | GCTTCATT | | |
| 854610 | N/A | N/A | 20206 | 20221 | CTGCGCAG | 80 | 1994 |
| | | | | | ACACTGGG | | |
| 854616 | N/A | N/A | 20213 | 20228 | CCATTCAC | 69 | 1995 |
| | | | | | TGCGCAGA | | |

TABLE 27
Reduction of SPDEF RNA by 4 μM 3-10-3 cEt
gapmers with a phosphorothioate backbone

| | SEQ | SEQ | SEQ | SEQ | | | |
|---|---|---|---|---|---|---|---|
| | ID | ID | ID | ID | | | |
| | NO: | NO: | NO: | NO: | | | |
| Com- | 1 | 1 | 2 | 2 | Sequence | SPDEF | SEQ |
| pound | Start | Stop | Start | Stop | (5′ to | (% | ID |
| Number | Site | Site | Site | Site | 3′) | UTC) | NO |
| 801690 | 82 | 97 | 1749 | 1764 | CAGCAGGC | 80 | 174 |
| | | | | | TTGGAGGA | | |
| 802055 | N/A | N/A | 12531 | 12546 | CCCCACGG | 104 | 387 |
| | | | | | GCCGCCCC | | |
| 854168 | N/A | N/A | 2101 | 2116 | GAAAGACC | 108 | 1996 |
| | | | | | CCATGCCA | | |
| 854174 | N/A | N/A | 2133 | 2148 | TGCCTGCA | 107 | 1997 |
| | | | | | GTCGCCCA | | |
| 854180 | N/A | N/A | 2151 | 2166 | TGCGCCCC | 80 | 1998 |
| | | | | | CTCCAAGT | | |
| 854186 | N/A | N/A | 2157 | 2172 | GCAAAGTG | 68 | 1999 |
| | | | | | CGCCCCCT | | |
| 854192 | N/A | N/A | 2360 | 2375 | CTGCACGG | 80 | 2000 |
| | | | | | CGGCCTCC | | |
| 854198 | N/A | N/A | 2368 | 2383 | CTCTGCAT | 67 | 2001 |
| | | | | | CTGCACGG | | |
| 854204 | N/A | N/A | 3378 | 3393 | AGCTCCGA | 65 | 2002 |
| | | | | | GAATGCCC | | |
| 854210 | N/A | N/A | 3384 | 3399 | CCTGGGAG | 83 | 2003 |
| | | | | | CTCCGAGA | | |
| 854216 | N/A | N/A | 3687 | 3702 | CCGGTTTT | 52 | 2004 |
| | | | | | TGCACTTC | | |
| 854222 | N/A | N/A | 3693 | 3708 | GTTCTCCC | 116 | 2005 |
| | | | | | GGTTTTTG | | |
| 854228 | N/A | N/A | 3700 | 3715 | AAAGTGGG | 71 | 2006 |
| | | | | | TTCTCCCG | | |
| 854234 | N/A | N/A | 3717 | 3732 | AACGACCT | 60 | 2007 |
| | | | | | CAGTGGTA | | |
| 854240 | N/A | N/A | 3725 | 3740 | ATACTCAC | 67 | 2008 |
| | | | | | AACGACCT | | |
| 854246 | N/A | N/A | 5761 | 5776 | CCGTACCT | 89 | 2009 |
| | | | | | CCCAGCTT | | |
| 854252 | N/A | N/A | 5769 | 5784 | CGCATACG | 63 | 2010 |
| | | | | | CCGTACCT | | |
| 854258 | N/A | N/A | 5777 | 5792 | TCCAGCCC | 86 | 2011 |
| | | | | | CGCATACG | | |
| 854264 | N/A | N/A | 6296 | 6311 | GTTGATGT | 76 | 2012 |
| | | | | | CTGGAGGC | | |
| 854270 | N/A | N/A | 6302 | 6317 | CCTGGAGT | 89 | 2013 |
| | | | | | TGATGTCT | | |
| 854276 | N/A | N/A | 7373 | 7388 | AACTGTCC | 81 | 2014 |
| | | | | | AGGCCAAC | | |
| 854282 | N/A | N/A | 7409 | 7424 | AGATCTCC | 68 | 2015 |
| | | | | | GGGCTTTC | | |
| 854288 | N/A | N/A | 7415 | 7430 | TCTTCTAG | 57 | 2016 |
| | | | | | ATCTCCGG | | |
| 854294 | N/A | N/A | 7430 | 7445 | TAGACGAG | 104 | 2017 |
| | | | | | GTGGGTTT | | |
| 854300 | N/A | N/A | 7441 | 7456 | CTCAGCAT | 86 | 2018 |
| | | | | | GAGTAGAC | | |
| 854306 | N/A | N/A | 8816 | 8831 | ATGTCTGG | 80 | 2019 |
| | | | | | ATTAAGGC | | |
| 854311 | N/A | N/A | 8829 | 8844 | TGGATTAA | 88 | 2020 |
| | | | | | GCCACATG | | |
| 854317 | N/A | N/A | 8843 | 8858 | GAGTTGAT | 83 | 2021 |
| | | | | | CTCTTCTG | | |
| 854323 | N/A | N/A | 8850 | 8865 | AAACCTCG | 101 | 2022 |
| | | | | | AGTTGATC | | |
| 854329 | N/A | N/A | 9115 | 9130 | TGATGGTC | 90 | 2023 |
| | | | | | CACCCATG | | |
| 854335 | N/A | N/A | 9138 | 9153 | CAGCCCAG | 83 | 2024 |
| | | | | | GATTAAAT | | |
| 854341 | N/A | N/A | 9154 | 9169 | TCTGTGCC | 74 | 2025 |
| | | | | | ATGCAATT | | |
| 854347 | N/A | N/A | 9851 | 9866 | ATCACCCG | 79 | 2026 |
| | | | | | CTTTCCTA | | |
| 854353 | N/A | N/A | 9864 | 9879 | GGCTTTCA | 66 | 2027 |
| | | | | | CCCACATC | | |
| 854359 | N/A | N/A | 9871 | 9886 | ACGCCCAG | 76 | 2028 |
| | | | | | GCTTTCAC | | |
| 854365 | N/A | N/A | 9883 | 9898 | AGCACCAG | 79 | 2029 |
| | | | | | TGCCACGC | | |
| 854371 | N/A | N/A | 9909 | 9924 | AACGGCAC | 93 | 2030 |
| | | | | | TGTGAGCC | | |
| 854377 | N/A | N/A | 9966 | 9981 | CAACCTGC | 95 | 2031 |
| | | | | | AACTAGGC | | |
| 854383 | N/A | N/A | 9977 | 9992 | GCTGGTGT | 70 | 2032 |
| | | | | | GCCCAACC | | |
| 854389 | N/A | N/A | 9999 | 10014 | GCTTACTG | 92 | 2033 |
| | | | | | GTCAGGCA | | |
| 854395 | N/A | N/A | 10006 | 10021 | GGGCTTGG | 90 | 2034 |
| | | | | | CTTACTGG | | |
| 854401 | N/A | N/A | 10147 | 10162 | CCTCGGTC | 76 | 2035 |
| | | | | | CTAGCTCC | | |
| 854407 | N/A | N/A | 10153 | 10168 | ACCAAGCC | 89 | 2036 |
| | | | | | TCGGTCCT | | |
| 854413 | N/A | N/A | 10169 | 10184 | AAGGAATC | 67 | 2037 |
| | | | | | TACTCCCC | | |
| 854419 | N/A | N/A | 10183 | 10198 | TATACCTA | 94 | 2038 |
| | | | | | AATGCCAA | | |
| 854425 | N/A | N/A | 10191 | 10206 | CCTTGCCC | 81 | 2039 |
| | | | | | TATACCTA | | |
| 854431 | N/A | N/A | 11241 | 11256 | AGGGCTCC | 71 | 2040 |
| | | | | | TTTAAGTG | | |
| 854437 | N/A | N/A | 11275 | 11290 | AGGGTGTT | 86 | 2041 |
| | | | | | CCCTTTGA | | |
| 854443 | N/A | N/A | 11595 | 11610 | CCTGATCC | 82 | 2042 |
| | | | | | ATCTCCAG | | |
| 854449 | N/A | N/A | 11630 | 11645 | TGCCCTAC | 102 | 2043 |
| | | | | | TGGGACAG | | |
| 854455 | N/A | N/A | 11636 | 11651 | TTATGGTG | 88 | 2044 |
| | | | | | CCCTACTG | | |
| 854461 | N/A | N/A | 11651 | 11666 | CTCTAACA | 99 | 2045 |
| | | | | | GTGACATT | | |
| 854467 | N/A | N/A | 12000 | 12015 | TATACGCT | 84 | 2046 |
| | | | | | CCTAATAA | | |
| 854473 | N/A | N/A | 12007 | 12022 | CAACAGAT | 94 | 2047 |
| | | | | | ATACGCTC | | |
| 854479 | N/A | N/A | 12021 | 12036 | AGGCAGAA | 87 | 2048 |
| | | | | | GATTACCA | | |
| 854485 | N/A | N/A | 12514 | 12529 | GCTTGGTT | 86 | 2049 |
| | | | | | TTGCCCAG | | |
| 854491 | N/A | N/A | 12520 | 12535 | GCCCCGGC | 92 | 2050 |
| | | | | | TTGGTTTT | | |
| 854497 | N/A | N/A | 12527 | 12542 | ACGGGCCG | 96 | 2051 |
| | | | | | CCCCGGCT | | |
| 854503 | N/A | N/A | 12535 | 12550 | TGCTCCCC | 102 | 2052 |
| | | | | | ACGGGCCG | | |
| 854509 | N/A | N/A | 12559 | 12574 | CTCAACAC | 106 | 2053 |
| | | | | | AAGCAGTC | | |
| 854515 | N/A | N/A | 15698 | 15713 | CATGGGTC | 92 | 2054 |
| | | | | | AGGACTGC | | |
| 854521 | N/A | N/A | 15745 | 15760 | GCTGCACA | 86 | 2055 |
| | | | | | GAGTTCAG | | |
| 854527 | N/A | N/A | 17291 | 17306 | ACGGTTGT | 57 | 2056 |
| | | | | | CCCCAGCT | | |
| 854533 | N/A | N/A | 17300 | 17315 | CTAGTATC | 75 | 2057 |
| | | | | | CACGGTTG | | |
| 854539 | N/A | N/A | 17307 | 17322 | GGACTTCC | 83 | 2058 |
| | | | | | TAGTATCC | | |
| 854545 | N/A | N/A | 17493 | 17508 | AACTTGTA | 43 | 2059 |
| | | | | | ACAGTGGT | | |
| 854551 | N/A | N/A | 17537 | 17552 | TGTGCTCG | 72 | 2060 |
| | | | | | AGTATTCA | | |
| 854557 | N/A | N/A | 17544 | 17559 | ATGTAAAT | 72 | 2061 |
| | | | | | GTGCTCGA | | |
| 854563 | N/A | N/A | 18113 | 18128 | TGAGTTGG | 88 | 2062 |
| | | | | | TCCTGTTT | | |
| 854569 | N/A | N/A | 18120 | 18135 | GGTCCTAT | 71 | 2063 |
| | | | | | GAGTTGGT | | |
| 854575 | N/A | N/A | 18129 | 18144 | CTCTGACA | 62 | 2064 |
| | | | | | GGGTCCTA | | |
| 854581 | N/A | N/A | 18433 | 18448 | ATCCAGGC | 114 | 2065 |
| | | | | | CGCTGCAG | | |
| 854587 | N/A | N/A | 18476 | 18491 | CTCACCAC | 88 | 2066 |
| | | | | | AGTAGTGA | | |
| 854593 | N/A | N/A | 18535 | 18550 | CATTGGCA | 97 | 2067 |
| | | | | | GCCACCCC | | |
| 854599 | N/A | N/A | 18542 | 18557 | CCGGCTTC | 81 | 2068 |
| | | | | | ATTGGCAG | | |
| 854605 | N/A | N/A | 18548 | 18563 | CCAGTCCC | 99 | 2069 |
| | | | | | GGCTTCAT | | |
| 854611 | N/A | N/A | 20207 | 20222 | ACTGCGCA | 92 | 2070 |
| | | | | | GACACTGG | | |
| 854617 | N/A | N/A | 20214 | 20229 | GCCATTCA | 101 | 2071 |
| | | | | | CTGCGCAG | | |

TABLE 28
Reduction of SPDEF RNA by 4 μM 3-10-3 cEt
gapmers with a phosphorothioate backbone

| | SEQ | SEQ | SEQ | SEQ | | | |
|---|---|---|---|---|---|---|---|
| | ID | ID | ID | ID | | | |
| | NO: | NO: | NO: | NO: | | | |
| Com- | 1 | 1 | 2 | 2 | Sequence | SPDEF | SEQ |
| pound | Start | Stop | Start | Stop | (5′ to | (% | ID |
| Number | Site | Site | Site | Site | 3′) | UTC) | NO |
| 801690 | 82 | 97 | 1749 | 1764 | CAGCAGGC | 113 | 174 |
| | | | | | TTGGAGGA | | |
| 802055 | N/A | N/A | 12531 | 12546 | CCCCACGG | 77 | 387 |
| | | | | | GCCGCCCC | | |
| 854169 | N/A | N/A | 2119 | 2134 | CACCCCCC | 91 | 2072 |
| | | | | | AGCTGGCA | | |
| 854175 | N/A | N/A | 2134 | 2149 | CTGCCTGC | 107 | 2073 |
| | | | | | AGTCGCCC | | |
| 854181 | N/A | N/A | 2152 | 2167 | GTGCGCCC | 90 | 2074 |
| | | | | | CCTCCAAG | | |
| 854187 | N/A | N/A | 2159 | 2174 | TGGCAAAG | 108 | 2075 |
| | | | | | TGCGCCCC | | |
| 854193 | N/A | N/A | 2361 | 2376 | TCTGCACG | 73 | 2076 |
| | | | | | GCGGCCTC | | |
| 854199 | N/A | N/A | 3361 | 3376 | CCACCATT | 96 | 2077 |
| | | | | | TGTCTGTG | | |
| 854205 | N/A | N/A | 3379 | 3394 | GAGCTCCG | 88 | 2078 |
| | | | | | AGAATGCC | | |
| 854211 | N/A | N/A | 3385 | 3400 | GCCTGGGA | 65 | 2079 |
| | | | | | GCTCCGAG | | |
| 854217 | N/A | N/A | 3688 | 3703 | CCCGGTTT | 100 | 2080 |
| | | | | | TTGCACTT | | |
| 854223 | N/A | N/A | 3694 | 3709 | GGTTCTCC | 81 | 2081 |
| | | | | | CGGTTTTT | | |
| 854229 | N/A | N/A | 3701 | 3716 | AAAAGTGG | 84 | 2082 |
| | | | | | GTTCTCCC | | |
| 854235 | N/A | N/A | 3719 | 3734 | ACAACGAC | 55 | 2083 |
| | | | | | CTCAGTGG | | |
| 854241 | N/A | N/A | 3727 | 3742 | TTATACTC | 78 | 2084 |
| | | | | | ACAACGAC | | |
| 854247 | N/A | N/A | 5762 | 5777 | GCCGTACC | 112 | 2085 |
| | | | | | TCCCAGCT | | |
| 854253 | N/A | N/A | 5770 | 5785 | CCGCATAC | 70 | 2086 |
| | | | | | GCCGTACC | | |
| 854259 | N/A | N/A | 5804 | 5819 | CAGTACCT | 100 | 2087 |
| | | | | | TCCCTCTT | | |
| 854265 | N/A | N/A | 6297 | 6312 | AGTTGATG | 89 | 2088 |
| | | | | | TCTGGAGG | | |
| 854271 | N/A | N/A | 6303 | 6318 | CCCTGGAG | 120 | 2089 |
| | | | | | TTGATGTC | | |
| 854277 | N/A | N/A | 7374 | 7389 | AAACTGTC | 78 | 2090 |
| | | | | | CAGGCCAA | | |
| 854283 | N/A | N/A | 7410 | 7425 | TAGATCTC | 71 | 2091 |
| | | | | | CGGGCTTT | | |
| 854289 | N/A | N/A | 7416 | 7431 | TTCTTCTA | 80 | 2092 |
| | | | | | GATCTCCG | | |
| 854295 | N/A | N/A | 7434 | 7449 | TGAGTAGA | 100 | 2093 |
| | | | | | CGAGGTGG | | |
| 854301 | N/A | N/A | 7442 | 7457 | ACTCAGCA | 82 | 2094 |
| | | | | | TGAGTAGA | | |
| 854307 | N/A | N/A | 8819 | 8834 | CACATGTC | 90 | 2095 |
| | | | | | TGGATTAA | | |
| 854312 | N/A | N/A | 8830 | 8845 | CTGGATTA | 83 | 2096 |
| | | | | | AGCCACAT | | |
| 854318 | N/A | N/A | 8844 | 8859 | CGAGTTGA | 99 | 2097 |
| | | | | | TCTCTTCT | | |
| 854324 | N/A | N/A | 8851 | 8866 | CAAACCTC | 82 | 2098 |
| | | | | | GAGTTGAT | | |
| 854330 | N/A | N/A | 9116 | 9131 | GTGATGGT | 84 | 2099 |
| | | | | | CCACCCAT | | |
| 854336 | N/A | N/A | 9139 | 9154 | TCAGCCCA | 80 | 2100 |
| | | | | | GGATTAAA | | |
| 854342 | N/A | N/A | 9846 | 9861 | CCGCTTTC | 83 | 2101 |
| | | | | | CTACCCAC | | |
| 854348 | N/A | N/A | 9852 | 9867 | CATCACCC | 123 | 2102 |
| | | | | | GCTTTCCT | | |
| 854354 | N/A | N/A | 9865 | 9880 | AGGCTTTC | 99 | 2103 |
| | | | | | ACCCACAT | | |
| 854360 | N/A | N/A | 9872 | 9887 | CACGCCCA | 64 | 2104 |
| | | | | | GGCTTTCA | | |
| 854366 | N/A | N/A | 9884 | 9899 | GAGCACCA | 81 | 2105 |
| | | | | | GTGCCACG | | |
| 854372 | N/A | N/A | 9910 | 9925 | GAACGGCA | 112 | 2106 |
| | | | | | CTGTGAGC | | |
| 854378 | N/A | N/A | 9967 | 9982 | CCAACCTG | 101 | 2107 |
| | | | | | CAACTAGG | | |
| 854384 | N/A | N/A | 9978 | 9993 | GGCTGGTG | 87 | 2108 |
| | | | | | TGCCCAAC | | |
| 854390 | N/A | N/A | 10001 | 10016 | TGGCTTAC | 68 | 2109 |
| | | | | | TGGTCAGG | | |
| 854396 | N/A | N/A | 10142 | 10157 | GTCCTAGC | 81 | 2110 |
| | | | | | TCCAACAC | | |
| 854402 | N/A | N/A | 10148 | 10163 | GCCTCGGT | 78 | 2111 |
| | | | | | CCTAGCTC | | |
| 854408 | N/A | N/A | 10155 | 10170 | CCACCAAG | 83 | 2112 |
| | | | | | CCTCGGTC | | |
| 854414 | N/A | N/A | 10170 | 10185 | CAAGGAAT | 86 | 2113 |
| | | | | | CTACTCCC | | |
| 854420 | N/A | N/A | 10185 | 10200 | CCTATACC | 92 | 2114 |
| | | | | | TAAATGCC | | |
| 854426 | N/A | N/A | 10192 | 10207 | ACCTTGCC | 91 | 2115 |
| | | | | | CTATACCT | | |
| 854432 | N/A | N/A | 11248 | 11263 | CCATTCAA | 99 | 2116 |
| | | | | | GGGCTCCT | | |
| 854438 | N/A | N/A | 11276 | 11291 | AAGGGTGT | 108 | 2117 |
| | | | | | TCCCTTTG | | |
| 854444 | N/A | N/A | 11599 | 11614 | GCTCCCTG | 76 | 2118 |
| | | | | | ATCCATCT | | |
| 854450 | N/A | N/A | 11631 | 11646 | GTGCCCTA | 104 | 2119 |
| | | | | | CTGGGACA | | |
| 854456 | N/A | N/A | 11637 | 11652 | TTTATGGT | 74 | 2120 |
| | | | | | GCCCTACT | | |
| 854462 | N/A | N/A | 11652 | 11667 | TCTCTAAC | 85 | 2121 |
| | | | | | AGTGACAT | | |
| 854468 | N/A | N/A | 12001 | 12016 | ATATACGC | 107 | 2122 |
| | | | | | TCCTAATA | | |
| 854474 | N/A | N/A | 12008 | 12023 | CCAACAGA | 75 | 2123 |
| | | | | | TATACGCT | | |
| 854480 | N/A | N/A | 12368 | 12383 | CATCAAGA | 95 | 2124 |
| | | | | | CAGGCTCA | | |
| 854486 | N/A | N/A | 12515 | 12530 | GGCTTGGT | 56 | 2125 |
| | | | | | TTTGCCCA | | |
| 854492 | N/A | N/A | 12521 | 12536 | CGCCCCGG | 70 | 2126 |
| | | | | | CTTGGTTT | | |
| 854498 | N/A | N/A | 12528 | 12543 | CACGGGCC | 77 | 2127 |
| | | | | | GCCCCGGC | | |
| 854504 | N/A | N/A | 12536 | 12551 | TTGCTCCC | 80 | 2128 |
| | | | | | CACGGGCC | | |
| 854510 | N/A | N/A | 12561 | 12576 | GCCTCAAC | 115 | 2129 |
| | | | | | ACAAGCAG | | |
| 854516 | N/A | N/A | 15699 | 15714 | ACATGGGT | 102 | 2130 |
| | | | | | CAGGACTG | | |
| 854522 | N/A | N/A | 15746 | 15761 | AGCTGCAC | 96 | 2131 |
| | | | | | AGAGTTCA | | |
| 854528 | N/A | N/A | 17293 | 17308 | CCACGGTT | 100 | 2132 |
| | | | | | GTCCCCAG | | |
| 854534 | N/A | N/A | 17301 | 17316 | CCTAGTAT | 89 | 2133 |
| | | | | | CCACGGTT | | |
| 854540 | N/A | N/A | 17308 | 17323 | AGGACTTC | 92 | 2134 |
| | | | | | CTAGTATC | | |
| 854546 | N/A | N/A | 17523 | 17538 | CATAGACT | 83 | 2135 |
| | | | | | TTCCCTGG | | |
| 854552 | N/A | N/A | 17538 | 17553 | ATGTGCTC | 89 | 2136 |
| | | | | | GAGTATTC | | |
| 854558 | N/A | N/A | 18096 | 18111 | TTACTCCT | 100 | 2137 |
| | | | | | TGACTCAG | | |
| 854564 | N/A | N/A | 18114 | 18129 | ATGAGTTG | 96 | 2138 |
| | | | | | GTCCTGTT | | |
| 854570 | N/A | N/A | 18121 | 18136 | GGGTCCTA | 105 | 2139 |
| | | | | | TGAGTTGG | | |
| 854576 | N/A | N/A | 18130 | 18145 | TCTCTGAC | 71 | 2140 |
| | | | | | AGGGTCCT | | |
| 854582 | N/A | N/A | 18434 | 18449 | CATCCAGG | 87 | 2141 |
| | | | | | CCGCTGCA | | |
| 854588 | N/A | N/A | 18478 | 18493 | GGCTCACC | 98 | 2142 |
| | | | | | ACAGTAGT | | |
| 854594 | N/A | N/A | 18536 | 18551 | TCATTGGC | 72 | 2143 |
| | | | | | AGCCACCC | | |
| 854600 | N/A | N/A | 18543 | 18558 | CCCGGCTT | 95 | 2144 |
| | | | | | CATTGGCA | | |
| 854606 | N/A | N/A | 18549 | 18564 | GCCAGTCC | 105 | 2145 |
| | | | | | CGGCTTCA | | |
| 854612 | N/A | N/A | 20208 | 20223 | CACTGCGC | 96 | 2146 |
| | | | | | AGACACTG | | |
| 854618 | N/A | N/A | 20216 | 20231 | GTGCCATT | 117 | 2147 |
| | | | | | CACTGCGC | | |

TABLE 29
Reduction of SPDEF RNA by 4 μM 3-10-3 cEt
gapmers with a phosphorothioate backbone

| | SEQ | SEQ | SEQ | SEQ | SEQ | SEQ | | | |
|---|---|---|---|---|---|---|---|---|---|
| | ID | ID | ID | ID | ID | ID | | | |
| | NO: | NO: | NO: | NO: | NO: | NO: | Se- | SPD | |
| Com- | 3 | 3 | 4 | 4 | 5 | 5 | quence | EF | SEQ |
| pound | Start | Stop | Start | Stop | Start | Stop | (5′ to | (% | ID |
| Number | Site | Site | Site | Site | Site | Site | 3′) | UTC) | NO |
| 801921 | 1055 | 1070 | N/A | N/A | N/A | N/A | GGCTGA | 98 | 2148 |
| | | | | | | | CTTCCA | | |
| | | | | | | | GATG | | |
| 801922 | 1060 | 1075 | N/A | N/A | N/A | N/A | GTCGAG | 86 | 2149 |
| | | | | | | | GCTGAC | | |
| | | | | | | | TTCC | | |
| 801923 | 1065 | 1080 | N/A | N/A | N/A | N/A | CACTGG | 101 | 2150 |
| | | | | | | | TCGAGG | | |
| | | | | | | | CTGA | | |
| 833205 | 1059 | 1074 | N/A | N/A | N/A | N/A | TCGAGG | 107 | 2151 |
| | | | | | | | CTGACT | | |
| | | | | | | | TCCA | | |
| 833206 | 1061 | 1076 | N/A | N/A | N/A | N/A | GGTCGA | 155 | 2152 |
| | | | | | | | GGCTGA | | |
| | | | | | | | CTTC | | |
| 833207 | 1062 | 1077 | N/A | N/A | N/A | N/A | TGGTCG | 124 | 2153 |
| | | | | | | | AGGCTG | | |
| | | | | | | | ACTT | | |
| 833208 | 1063 | 1078 | N/A | N/A | N/A | N/A | CTGGTC | 111 | 2154 |
| | | | | | | | GAGGCT | | |
| | | | | | | | GACT | | |
| 833209 | 1064 | 1079 | N/A | N/A | N/A | N/A | ACTGGT | 105 | 2155 |
| | | | | | | | CGAGGC | | |
| | | | | | | | TGAC | | |
| 833439 | N/A | N/A | 835 | 850 | N/A | N/A | TCTCCC | 60 | 2156 |
| | | | | | | | AGCTTG | | |
| | | | | | | | CCAC | | |
| 833440 | N/A | N/A | 836 | 851 | N/A | N/A | GTCTCC | 81 | 2157 |
| | | | | | | | CAGCTT | | |
| | | | | | | | GCCA | | |
| 833441 | N/A | N/A | 837 | 852 | N/A | N/A | TGTCTC | 87 | 2158 |
| | | | | | | | CCAGCT | | |
| | | | | | | | TGCC | | |
| 833442 | N/A | N/A | 845 | 860 | N/A | N/A | GGCGGC | 99 | 2159 |
| | | | | | | | TGTGTC | | |
| | | | | | | | TCCC | | |
| 833443 | N/A | N/A | 846 | 861 | N/A | N/A | TGGCGG | 143 | 2160 |
| | | | | | | | CTGTGT | | |
| | | | | | | | CTCC | | |
| 833444 | N/A | N/A | 847 | 862 | N/A | N/A | CTGGCG | 127 | 2161 |
| | | | | | | | GCTGTG | | |
| | | | | | | | TCTC | | |
| 833514 | N/A | N/A | N/A | N/A | 30 | 45 | GTCTGT | 107 | 2162 |
| | | | | | | | GAAGTG | | |
| | | | | | | | TCAG | | |
| 833515 | N/A | N/A | N/A | N/A | 31 | 46 | TGTCTG | 152 | 2163 |
| | | | | | | | TGAAGT | | |
| | | | | | | | GTCA | | |
| 833516 | N/A | N/A | N/A | N/A | 32 | 47 | GTGTCT | 100 | 2164 |
| | | | | | | | GTGAAG | | |
| | | | | | | | TGTC | | |
| 833517 | N/A | N/A | N/A | N/A | 39 | 54 | GGCGGC | 89 | 2165 |
| | | | | | | | TGTGTC | | |
| | | | | | | | TGTG | | |

### Example 2: Effect of Modified Oligonucleotides on Human SPDEF RNA In Vitro, Single Dose

[0647] Additional oligonucleotides with further chemistry modifications were designed to target an SPDEF nucleic acid and were tested for their effect on SPDEF RNA levels in vitro. The chemistry notation column in the tables below specifies the specific chemistry notation for modified oligonucleotides; wherein subscript ‘d’ represents a 2′-β-D-deoxyribosyl sugar moiety, subscript ‘e’ represents a 2′-MOE sugar moiety, subscript ‘y’ represents a 2′-O-methyl sugar moiety, subscript ‘k’ represents a cEt modified sugar moiety, subscript ‘s’ represents a phosphorothioate internucleoside linkage, and superscript ‘m’ before the cytosine residue represents a 5-methyl cytosine.

[0648] “Start site” indicates the 5′-most nucleoside to which the gapmer is targeted in the human gene sequence. “Stop site” indicates the 3′-most nucleoside to which the gapmer is targeted in the human gene sequence. Modified oligonucleotide listed in the tables below are targeted to either SEQ ID NO: 1 or SEQ ID NO: 2 (described herein above). ‘N/A’ indicates that the modified oligonucleotide does not target that particular gene sequence with 100% complementarity.

[0649] The modified oligonucleotides were tested in a series of experiments that had similar culture conditions. The results for each experiment are presented in separate tables shown below. Cultured VCaP cells at a density of 20,000 cells per well were transfected using electroporation with 4 μM of modified oligonucleotide. After a treatment period of approximately 24 hours, RNA was isolated from the cells and SPDEF RNA levels were measured by quantitative real-time RTPCR. Human primer probe set RTS35007 was used to measure RNA levels. SPDEF RNA levels were adjusted according to total RNA content, as measured by RIBOGREEN®. Reduction of SPDEF RNA is presented in the tables as percent SPDEF RNA levels relative to untreated control (UTC) cells (% UTC). Each table represents results from an individual assay plate. The compounds marked with an asterisk (*) indicate that the modified oligonucleotide is complementary to the amplicon region of the primer probe set. Additional assays may be used to measure the potency and efficacy of the modified oligonucleotides complementary to the amplicon region.

TABLE 30
Reduction of SPDEF RNA by 4 μM modified oligonucleotides

| | SEQ | SEQ | | | | |
|---|---|---|---|---|---|---|
| | ID | ID | | | | |
| Com- | NO: 2 | NO: 2 | | | SPDEF | SEQ |
| pound | Start | Stop | Sequence | Chemistry Notation | (% | ID |
| Number | Site | Site | (5′ to 3′) | (5′ to 3′) | UTC) | NO |
| 833814 | 12009 | 12024 | ACCAACAGATA | Aₖₛ^{m}Cₖₛ^{m}CₖₛA_{ds}A_{ds}^{m}C_{ds}A_{ds}G_{ds}A | 46 | 993 |
| | | | TACGC | _{ds}T_{ds}A_{ds}T_{ds}A_{ds}^{m}CₖₛGₖₛ^{m}Cₖ | | |
| 854302 | 8811 | 8826 | TGGATTAAGGC | TₖₛGₖₛGₖₛA_{ds}T_{ds}T_{ds}A_{ds}A_{ds}G_{ds}G_{ds} | 36 | 1715 |
| | | | TCAGC | ^{m}C_{ds}T_{ds}^{m}C_{ds}AₖₛGₖₛ^{m}Cₖ | | |
| 936288 | 3521 | 3536 | GTCTGGTAGTTT | GₖₛTₖₛ^{m}CₖₛT_{ds}G_{ds}G_{ds}T_{ds}A_{ds}G_{ds}T | 46 | 2166 |
| | | | TCAG | _{ds}T_{ds}T_{ds}T_{ds}^{m}CₖₛAₖₛGₖ | | |
| 936290 | 3523 | 3538 | AAGTCTGGTAG | AₖₛAₖₛGₖₛT_{ds}^{m}C_{ds}T_{ds}G_{ds}G_{ds}T_{ds}A | 47 | 2167 |
| | | | TTTTC | _{ds}G_{ds}T_{ds}T_{ds}TₖₛTₖₛ^{m}Cₖ | | |
| 936291 | 3524 | 3539 | CAAGTCTGGTA | ^{m}CₖₛAₖₛAₖₛG_{ds}T_{ds}^{m}C_{ds}T_{ds}G_{ds}G_{ds} | 48 | 2168 |
| | | | GTTTT | T_{ds}A_{ds}G_{ds}T_{ds}TₖₛTₖₛTₖ | | |
| 936292 | 3525 | 3540 | GCAAGTCTGGT | Gₖₛ^{m}CₖₛAₖₛA_{ds}G_{ds}T_{ds}^{m}C_{ds}T_{ds}G_{ds} | 38 | 2169 |
| | | | AGTTT | G_{ds}T_{ds}A_{ds}G_{ds}TₖₛTₖₛTₖ | | |
| 936293 | 3527 | 3542 | AAGCAAGTCTG | AₖₛAₖₛGₖₛ^{m}C_{ds}A_{ds}A_{ds}G_{ds}T_{ds}^{m}C_{ds} | 73 | 2170 |
| | | | GTAGT | T_{ds}G_{ds}G_{ds}T_{ds}AₖₛGₖₛTₖ | | |
| 936294 | 3528 | 3543 | TAAGCAAGTCT | TₖₛAₖₛAₖₛG_{ds}^{m}C_{ds}A_{ds}A_{ds}G_{ds}T_{ds}^{m} | 54 | 2171 |
| | | | GGTAG | C_{ds}T_{ds}G_{ds}G_{ds}TₖₛAₖₛGₖ | | |
| 936297 | 3535 | 3550 | TGTGCAATAAG | TₖₛGₖₛTₖₛG_{ds}^{m}C_{ds}A_{ds}A_{ds}T_{ds}A_{ds}A | 54 | 2172 |
| | | | CAAGT | _{ds}G_{ds}^{m}C_{ds}A_{ds}AₖₛGₖₛTₖ | | |
| 936298 | 3536 | 3551 | GTGTGCAATAA | GₖₛTₖₛGₖₛT_{ds}G_{ds}^{m}C_{ds}A_{ds}A_{ds}T_{ds}A | 45 | 2173 |
| | | | GCAAG | _{ds}A_{ds}G_{ds}^{m}C_{ds}AₖₛAₖₛGₖ | | |
| 936299 | 3537 | 3552 | AGTGTGCAATA | AₖₛGₖₛTₖₛG_{ds}T_{ds}G_{ds}^{m}C_{ds}A_{ds}A_{ds}T | 32 | 2174 |
| | | | AGCAA | _{ds}A_{ds}A_{ds}G_{ds}^{m}CₖₛAₖₛAₖ | | |
| 936300 | 3538 | 3553 | CAGTGTGCAAT | ^{m}CₖₛAₖₛGₖₛT_{ds}G_{ds}T_{ds}G_{ds}^{m}C_{ds}A_{ds} | 44 | 2175 |
| | | | AAGCA | A_{ds}T_{ds}A_{ds}A_{ds}Gₖₛ^{m}CₖₛAₖ | | |
| 936301 | 3539 | 3554 | ACAGTGTGCAA | Aₖₛ^{m}CₖₛAₖₛG_{ds}T_{ds}G_{ds}T_{ds}G_{ds}^{m}C_{ds} | 38 | 2176 |
| | | | TAAGC | A_{ds}A_{ds}T_{ds}A_{ds}AₖₛGₖₛ^{m}Cₖ | | |
| 936310 | 3785 | 3800 | CAGGCTGCAAC | ^{m}CₖₛAₖₛGₖₛG_{ds}^{m}C_{ds}T_{ds}G_{ds}^{m}C_{ds}A | 30 | 2177 |
| | | | AAGTC | _{ds}A_{ds}^{m}C_{ds}A_{ds}A_{ds}GₖₛTₖₛ^{m}Cₖ | | |
| 936311 | 3786 | 3801 | TCAGGCTGCAA | Tₖₛ^{m}CₖₛAₖₛG_{ds}G_{ds}^{m}C_{ds}T_{ds}G_{ds}^{m}C_{d} | 45 | 2178 |
| | | | CAAGT | sA_{ds}A_{ds}^{m}C_{ds}A_{ds}AₖₛGₖₛTₖ | | |
| 936312 | 3790 | 3805 | ATACTCAGGCT | AₖₛTₖₛAₖₛ^{m}C_{ds}T_{ds}^{m}C_{ds}A_{ds}G_{ds}G_{ds} | 60 | 2179 |
| | | | GCAAC | ^{m}C_{ds}T_{ds}G_{ds}^{m}C_{ds}AₖₛAₖₛ^{m}Cₖ | | |
| 936313 | 3791 | 3806 | TATACTCAGGC | TₖₛAₖₛTₖₛA_{ds}^{m}C_{ds}T_{ds}^{m}C_{ds}A_{ds}G_{ds} | 48 | 2180 |
| | | | TGCAA | G_{ds}^{m}C_{ds}T_{ds}G_{ds}^{m}CₖₛAₖₛAₖ | | |
| 936314 | 3792 | 3807 | TTATACTCAGG | TₖₛTₖₛAₖₛT_{ds}A_{ds}^{m}C_{ds}T_{ds}^{m}C_{ds}A_{ds} | 57 | 2181 |
| | | | CTGCA | G_{ds}G_{ds}^{m}C_{ds}T_{ds}Gₖₛ^{m}CₖₛAₖ | | |
| 936315 | 3794 | 3809 | GGTTATACTCA | GₖₛGₖₛTₖₛT_{ds}A_{ds}T_{ds}A_{ds}^{m}C_{ds}T_{ds}^{m} | 43 | 2182 |
| | | | GGCTG | C_{ds}A_{ds}G_{ds}G_{ds}^{m}CₖₛTₖₛGₖ | | |
| 936316 | 3796 | 3811 | CGGGTTATACT | ^{m}CₖₛGₖₛGₖₛG_{ds}T_{ds}T_{ds}A_{ds}T_{ds}A_{ds}^{m} | 35 | 2183 |
| | | | CAGGC | C_{ds}T_{ds}^{m}C_{ds}A_{ds}GₖₛGₖₛ^{m}Cₖ | | |
| 936317 | 3797 | 3812 | CCGGGTTATAC | ^{m}Cₖₛ^{m}CₖₛGₖₛG_{ds}G_{ds}T_{ds}T_{ds}A_{ds}T_{ds} | 43 | 2184 |
| | | | TCAGG | A_{ds}^{m}C_{ds}T_{ds}^{m}C_{ds}AₖₛGₖₛGₖ | | |
| 936318 | 3798 | 3813 | CCCGGGTTATA | ^{m}Cₖₛ^{m}Cₖₛ^{m}CₖₛG_{ds}G_{ds}G_{ds}T_{ds}T_{ds}A_{d} | 63 | 2185 |
| | | | CTCAG | ₛT_{ds}A_{ds}^{m}C_{ds}T_{ds}^{m}CₖₛAₖₛGₖ | | |
| 936325 | 3806 | 3821 | TTAACTTCCCCG | TₖₛTₖₛAₖₛA_{ds}^{m}C_{ds}T_{ds}T_{ds}^{m}C_{ds}^{m}C_{ds} | 52 | 2186 |
| | | | GGTT | ^{m}C_{ds}^{m}C_{ds}G_{ds}G_{ds}GₖₛTₖₛTₖ | | |
| 936326 | 3808 | 3823 | AATTAACTTCC | AₖₛAₖₛTₖₛT_{ds}A_{ds}A_{ds}^{m}C_{ds}T_{ds}T_{ds}^{m} | 84 | 2187 |
| | | | CCGGG | C_{ds}^{m}C_{ds}^{m}C_{ds}^{m}C_{ds}GₖₛGₖₛGₖ | | |
| 936327 | 3809 | 3824 | AAATTAACTTC | AₖₛAₖₛAₖₛT_{ds}T_{ds}A_{ds}A_{ds}^{m}C_{ds}T_{ds}T | 88 | 2188 |
| | | | CCCGG | _{ds}^{m}C_{ds}^{m}C_{ds}^{m}C_{ds}^{m}CₖₛGₖₛGₖ | | |
| 936329 | 6063 | 6078 | ATTCCGCTCAA | AₖₛTₖₛTₖₛ^{m}C_{ds}^{m}C_{ds}G_{ds}^{m}C_{ds}T_{ds}^{m}C | 64 | 2189 |
| | | | CCTTC | _{ds}A_{ds}A_{ds}^{m}C_{ds}^{m}C_{ds}TₖₛTₖₛ^{m}Cₖ | | |
| 936330 | 6064 | 6079 | AATTCCGCTCA | AₖₛAₖₛTₖₛT_{ds}^{m}C_{ds}^{m}C_{ds}G_{ds}^{m}C_{ds}T_{d} | 80 | 2190 |
| | | | ACCTT | ₛ^{m}C_{ds}A_{ds}A_{ds}^{m}C_{ds}^{m}CₖₛTₖₛTₖ | | |
| 936331 | 6065 | 6080 | CAATTCCGCTC | ^{m}CₖₛAₖₛAₖₛT_{ds}T_{ds}^{m}C_{ds}^{m}C_{ds}G_{ds}^{m} | 66 | 2191 |
| | | | AACCT | C_{ds}T_{ds}^{m}C_{ds}A_{ds}A_{ds}^{m}Cₖₛ^{m}CₖₛTₖ | | |
| 936332 | 6066 | 6081 | ACAATTCCGCT | Aₖₛ^{m}CₖₛAₖₛA_{ds}T_{ds}T_{ds}^{m}C_{ds}^{m}C_{ds}G_{d} | 71 | 2192 |
| | | | CAACC | ₛ^{m}C_{ds}T_{ds}^{m}C_{ds}A_{ds}Aₖₛ^{m}Cₖₛ^{m}Cₖ | | |
| 936333 | 6068 | 6083 | CTACAATTCCG | ^{m}CₖₛTₖₛAₖₛ^{m}C_{ds}A_{ds}A_{ds}T_{ds}T_{ds}^{m}C_{d} | 83 | 2193 |
| | | | CTCAA | ₛ^{m}C_{ds}G_{ds}^{m}C_{ds}T_{ds}^{m}CₖₛAₖₛAₖ | | |
| 936334 | 6070 | 6085 | AACTACAATTC | AₖₛAₖₛ^{m}CₖₛT_{ds}A_{ds}^{m}C_{ds}A_{ds}A_{ds}T_{ds} | 69 | 2194 |
| | | | CGCTC | T_{ds}^{m}C_{ds}^{m}C_{ds}G_{ds}^{m}CₖₛTₖₛ^{m}Cₖ | | |
| 936335 | 6071 | 6086 | CAACTACAATT | ^{m}CₖₛAₖₛAₖₛ^{m}C_{ds}T_{ds}A_{ds}^{m}C_{ds}A_{ds}A | 63 | 2195 |
| | | | CCGCT | _{ds}T_{ds}T_{ds}^{m}C_{ds}^{m}C_{ds}Gₖₛ^{m}CₖₛTₖ | | |
| 936336 | 6073 | 6088 | AGCAACTACAA | AₖₛGₖₛ^{m}CₖₛA_{ds}A_{ds}^{m}C_{ds}T_{ds}A_{ds}^{m}C | 27 | 2196 |
| | | | TTCCG | _{ds}A_{ds}A_{ds}T_{ds}T_{ds}^{m}Cₖₛ^{m}CₖₛGₖ | | |
| 936341 | 6081 | 6096 | CCCACCATAGC | ^{m}Cₖₛ^{m}Cₖₛ^{m}CₖₛA_{ds}^{m}C_{ds}^{m}C_{ds}A_{ds}T_{ds} | 50 | 2197 |
| | | | AACTA | A_{ds}G_{ds}^{m}C_{ds}A_{ds}A_{ds}^{m}CₖₛTₖₛAₖ | | |
| 936347 | 6356 | 6371 | AGGCATACTCC | AₖₛGₖₛGₖₛ^{m}C_{ds}A_{ds}T_{ds}A_{ds}^{m}C_{ds}T_{ds} | 55 | 2198 |
| | | | ATTTA | ^{m}C_{ds}^{m}C_{ds}A_{ds}T_{ds}TₖₛTₖₛAₖ | | |
| 936348 | 6357 | 6372 | AAGGCATACTC | AₖₛAₖₛGₖₛG_{ds}^{m}C_{ds}A_{ds}T_{ds}A_{ds}^{m}C_{ds} | 62 | 2199 |
| | | | CATTT | T_{ds}^{m}C_{ds}^{m}C_{ds}A_{ds}TₖₛTₖₛTₖ | | |
| 936349 | 6358 | 6373 | AAAGGCATACT | AₖₛAₖₛAₖₛG_{ds}G_{ds}^{m}C_{ds}A_{ds}T_{ds}A_{ds}^{m} | 53 | 2200 |
| | | | CCATT | C_{ds}T_{ds}^{m}C_{ds}^{m}C_{ds}AₖₛTₖₛTₖ | | |
| 936351 | 6370 | 6385 | TCCCTTGTAAG | Tₖₛ^{m}Cₖₛ^{m}Cₖₛ^{m}C_{ds}T_{ds}T_{ds}G_{ds}T_{ds}A_{ds} | 82 | 2201 |
| | | | CAAAG | A_{ds}G_{ds}^{m}C_{ds}A_{ds}AₖₛAₖₛGₖ | | |
| 936358 | 7446 | 7461 | TTGGACTCAGC | TₖₛTₖₛGₖₛG_{ds}A_{ds}^{m}C_{ds}T_{ds}^{m}C_{ds}A_{ds} | 63 | 2202 |
| | | | ATGAG | G_{ds}^{m}C_{ds}A_{ds}T_{ds}GₖₛAₖₛGₖ | | |
| 936359 | 7447 | 7462 | CTTGGACTCAG | ^{m}CₖₛTₖₛTₖₛG_{ds}G_{ds}A_{ds}^{m}C_{ds}T_{ds}^{m}C_{d} | 65 | 2203 |
| | | | CATGA | ₛA_{ds}G_{ds}^{m}C_{ds}A_{ds}TₖₛGₖₛAₖ | | |
| 936365 | 8290 | 8305 | TATCCTCACCCC | TₖₛAₖₛTₖₛ^{m}C_{ds}^{m}C_{ds}T_{ds}^{m}C_{ds}A_{ds}^{m}C | 68 | 2204 |
| | | | TACC | _{ds}^{m}C_{ds}^{m}C_{ds}^{m}C_{ds}T_{ds}Aₖₛ^{m}Cₖₛ^{m}Cₖ | | |
| 936368 | 8297 | 8312 | GTAAATGTATC | GₖₛTₖₛAₖₛA_{ds}A_{ds}T_{ds}G_{ds}T_{ds}A_{ds}T_{ds} | 77 | 2205 |
| | | | CTCAC | ^{m}C_{ds}^{m}C_{ds}T_{ds}^{m}CₖₛAₖₛ^{m}Cₖ | | |
| 936370 | 8579 | 8594 | TTAGTGCAGCT | TₖₛTₖₛAₖₛG_{ds}T_{ds}G_{ds}^{m}C_{ds}A_{ds}G_{ds}^{m} | 53 | 2206 |
| | | | TTTCC | C_{ds}T_{ds}T_{ds}T_{ds}Tₖₛ^{m}Cₖₛ^{m}Cₖ | | |
| 936376 | 8586 | 8601 | GAGAGATTTAG | GₖₛAₖₛGₖₛA_{ds}G_{ds}A_{ds}T_{ds}T_{ds}T_{ds}A_{ds} | 65 | 2207 |
| | | | TGCAG | G_{ds}T_{ds}G_{ds}^{m}CₖₛAₖₛGₖ | | |
| 936377 | 8588 | 8603 | AGGAGAGATTT | AₖₛGₖₛGₖₛA_{ds}G_{ds}A_{ds}G_{ds}A_{ds}T_{ds}T_{d} | 78 | 2208 |
| | | | AGTGC | ₛT_{ds}A_{ds}G_{ds}TₖₛGₖₛ^{m}Cₖ | | |
| 936378 | 9295 | 9310 | ATACCTGCCCC | AₖₛTₖₛAₖₛ^{m}C_{ds}^{m}C_{ds}T_{ds}G_{ds}^{m}C_{ds}^{m} | 62 | 2209 |
| | | | TGTGC | C_{ds}^{m}C_{ds}^{m}C_{ds}T_{ds}G_{ds}TₖₛGₖₛ^{m}Cₖ | | |
| 936379 | 9296 | 9311 | CATACCTGCCC | ^{m}CₖₛAₖₛTₖₛA_{ds}^{m}C_{ds}^{m}C_{ds}T_{ds}G_{ds}^{m} | 69 | 2210 |
| | | | CTGTG | C_{ds}^{m}C_{ds}^{m}C_{ds}^{m}C_{ds}T_{ds}GₖₛTₖₛGₖ | | |
| 936380 | 9297 | 9312 | TCATACCTGCC | Tₖₛ^{m}CₖₛAₖₛT_{ds}A_{ds}^{m}C_{ds}^{m}C_{ds}T_{ds}G_{d} | 70 | 2211 |
| | | | CCTGT | ₛ^{m}C_{ds}^{m}C_{ds}^{m}C_{ds}^{m}C_{ds}TₖₛGₖₛTₖ | | |
| 936381 | 9298 | 9313 | TTCATACCTGCC | TₖₛTₖₛ^{m}CₖₛA_{ds}T_{ds}A_{ds}^{m}C_{ds}^{m}C_{ds}T_{ds} | 43 | 2212 |
| | | | CCTG | G_{ds}^{m}C_{ds}^{m}C_{ds}^{m}C_{ds}^{m}CₖₛTₖₛGₖ | | |
| 936382 | 9300 | 9315 | ATTTCATACCTG | AₖₛTₖₛTₖₛT_{ds}^{m}C_{ds}A_{ds}T_{ds}A_{ds}^{m}C_{ds}^{m} | 46 | 2213 |
| | | | CCCC | C_{ds}T_{ds}G_{ds}^{m}C_{ds}^{m}Cₖₛ^{m}Cₖₛ^{m}Cₖ | | |
| 936383 | 9305 | 9320 | ATGGCATTTCA | AₖₛTₖₛGₖₛG_{ds}^{m}C_{ds}A_{ds}T_{ds}T_{ds}T_{ds}^{m} | 58 | 2214 |
| | | | TACCT | C_{ds}A_{ds}T_{ds}A_{ds}^{m}Cₖₛ^{m}CₖₛTₖ | | |
| 936389 | 9367 | 9382 | AGCAGGGTCCG | AₖₛGₖₛ^{m}CₖₛA_{ds}G_{ds}G_{ds}G_{ds}T_{ds}^{m}C_{ds} | 111 | 2215 |
| | | | GACCA | ^{m}C_{ds}G_{ds}G_{ds}A_{ds}^{m}Cₖ^{m}CₖₛAₖ | | |
| 936390 | 9369 | 9384 | GCAGCAGGGTC | Gₖₛ^{m}CₖₛAₖₛG_{ds}^{m}C_{ds}A_{ds}G_{ds}G_{ds}G_{ds} | 64 | 2216 |
| | | | CGGAC | T_{ds}^{m}C_{ds}^{m}C_{ds}G_{ds}GₖₛAₖₛ^{m}Cₖ | | |
| 936391 | 9370 | 9385 | AGCAGCAGGGT | AₖₛGₖₛ^{m}CₖₛA_{ds}G_{ds}^{m}C_{ds}A_{ds}G_{ds}G_{ds} | 62 | 2217 |
| | | | CCGGA | G_{ds}T_{ds}^{m}C_{ds}^{m}C_{ds}GₖₛGₖₛAₖ | | |
| 936392 | 9371 | 9386 | TAGCAGCAGGG | TₖₛAₖₛGₖₛ^{m}C_{ds}A_{ds}G_{ds}^{m}C_{ds}A_{ds}G_{ds} | 79 | 2218 |
| | | | TCCGG | G_{ds}G_{ds}T_{ds}^{m}C_{ds}^{m}CₖₛGₖₛGₖ | | |
| 936393 | 9372 | 9387 | TTAGCAGCAGG | TₖₛTₖₛAₖₛG_{ds}^{m}C_{ds}A_{ds}G_{ds}^{m}C_{ds}A_{ds} | 59 | 2219 |
| | | | GTCCG | G_{ds}G_{ds}G_{ds}T_{ds}^{m}Cₖₛ^{m}CₖₛGₖ | | |
| 936394 | 9373 | 9388 | ATTAGCAGCAG | AₖₛTₖₛTₖₛA_{ds}G_{ds}^{m}C_{ds}A_{ds}G_{ds}^{m}C_{ds} | 64 | 2220 |
| | | | GGTCC | A_{ds}G_{ds}G_{ds}G_{ds}Tₖₛ^{m}Cₖₛ^{m}Cₖ | | |
| 936396 | 9376 | 9391 | CTTATTAGCAG | ^{m}CₖₛTₖₛTₖₛA_{ds}T_{ds}T_{ds}A_{ds}G_{ds}^{m}C_{ds} | 38 | 2221 |
| | | | CAGGG | A_{ds}G_{ds}^{m}C_{ds}A_{ds}GₖₛGₖₛGₖ | | |
| 936397 | 9378 | 9393 | TGCTTATTAGC | TₖₛGₖₛ^{m}CₖₛT_{ds}T_{ds}A_{ds}T_{ds}T_{ds}A_{ds}G_{d} | 67 | 2222 |
| | | | AGCAG | ₛ^{m}C_{ds}A_{ds}G_{ds}^{m}CₖₛAₖₛGₖ | | |
| 936402 | 9791 | 9806 | TGCGGACAGTG | TₖₛGₖₛ^{m}CₖₛG_{ds}G_{ds}A_{ds}^{m}C_{ds}A_{ds}G_{ds} | 85 | 2223 |
| | | | AGGCT | T_{ds}G_{ds}A_{ds}G_{ds}Gₖₛ^{m}CₖₛTₖ | | |
| 936403 | 9792 | 9807 | ATGCGGACAGT | AₖₛTₖₛGₖₛ^{m}C_{ds}G_{ds}G_{ds}A_{ds}^{m}C_{ds}A_{ds} | 66 | 2224 |
| | | | GAGGC | G_{ds}T_{ds}G_{ds}A_{ds}GₖₛGₖₛ^{m}Cₖ | | |
| 936404 | 9793 | 9808 | GATGCGGACAG | GₖₛAₖₛTₖₛG_{ds}^{m}C_{ds}G_{ds}G_{ds}A_{ds}^{m}C_{ds} | 65 | 2225 |
| | | | TGAGG | A_{ds}G_{ds}T_{ds}G_{ds}AₖₛGₖₛGₖ | | |
| 936406 | 9795 | 9810 | TAGATGCGGAC | TₖₛAₖₛGₖₛA_{ds}T_{ds}G_{ds}^{m}C_{ds}G_{ds}G_{ds}A | 57 | 2226 |
| | | | AGTGA | _{ds}^{m}C_{ds}A_{ds}G_{ds}TₖₛGₖₛAₖ | | |
| 936407 | 9797 | 9812 | TATAGATGCGG | TₖₛAₖₛTₖₛA_{ds}G_{ds}A_{ds}T_{ds}G_{ds}^{m}C_{ds}G | 70 | 2227 |
| | | | ACAGT | _{ds}G_{ds}A_{ds}^{m}C_{ds}AₖₛGₖₛTₖ | | |
| 936408 | 9798 | 9813 | TTATAGATGCG | TₖₛTₖₛAₖₛT_{ds}A_{ds}G_{ds}A_{ds}T_{ds}G_{ds}^{m}C | 73 | 2228 |
| | | | GACAG | _{ds}G_{ds}G_{ds}A_{ds}^{m}CₖₛAₖₛGₖ | | |
| 936409 | 9800 | 9815 | CTTTATAGATG | ^{m}CₖₛTₖₛTₖₛT_{ds}A_{ds}T_{ds}A_{ds}G_{ds}A_{ds}T_{d} | 45 | 2229 |
| | | | CGGAC | ₛG_{ds}^{m}C_{ds}G_{ds}GₖₛAₖₛ^{m}Cₖ | | |
| 936410 | 9802 | 9817 | TGCTTTATAGAT | TₖₛGₖₛ^{m}CₖₛT_{ds}T_{ds}T_{ds}A_{ds}T_{ds}A_{ds}G_{d} | 48 | 2230 |
| | | | GCGG | ₛA_{ds}T_{ds}G_{ds}^{m}CₖₛGₖₛGₖ | | |
| 936412 | 9808 | 9823 | GAGCCCTGCTT | GₖₛAₖₛGₖₛ^{m}C_{ds}^{m}C_{ds}^{m}C_{ds}T_{ds}G_{ds}^{m} | 76 | 2231 |
| | | | TATAG | C_{ds}T_{ds}T_{ds}T_{ds}A_{ds}TₖₛAₖₛGₖ | | |
| 936413 | 10269 | 10284 | GAGGTAAATCC | GₖₛAₖₛGₖₛG_{ds}T_{ds}A_{ds}A_{ds}A_{ds}T_{ds}^{m}C | 44 | 2232 |
| | | | CCAAA | _{ds}^{m}C_{ds}^{m}C_{ds}^{m}C_{ds}AₖₛAₖₛAₖ | | |
| 936415 | 10271 | 10286 | GAGAGGTAAAT | GₖₛAₖₛGₖₛA_{ds}G_{ds}G_{ds}T_{ds}A_{ds}A_{ds}A_{d} | 33 | 2233 |
| | | | CCCCA | ₛT_{ds}^{m}C_{ds}^{m}C_{ds}^{m}Cₖₛ^{m}CₖₛAₖ | | |
| 936416 | 10273 | 10288 | CAGAGAGGTAA | ^{m}CₖₛAₖₛGₖₛA_{ds}G_{ds}A_{ds}G_{ds}G_{ds}T_{ds} | 28 | 2234 |
| | | | ATCCC | A_{ds}A_{ds}A_{ds}T_{ds}^{m}Cₖₛ^{m}Cₖ | | |
| 936419 | 10689 | 10704 | GACACATCCTT | GₖₛAₖₛ^{m}CₖₛA_{ds}^{m}C_{ds}A_{ds}T_{ds}^{m}C_{ds}^{m} | 45 | 2235 |
| | | | GACAC | C_{ds}T_{ds}T_{ds}G_{ds}A_{ds}^{m}CₖₛAₖₛ^{m}Cₖ | | |
| 936420 | 10691 | 10706 | ATGACACATCC | AₖₛTₖₛGₖₛA_{ds}^{m}C_{ds}A_{ds}^{m}C_{ds}A_{ds}T_{ds} | 61 | 2236 |
| | | | TTGAC | ^{m}C_{ds}^{m}C_{ds}T_{ds}T_{ds}GₖₛAₖₛ^{m}Cₖ | | |
| 936421 | 10693 | 10708 | TAATGACACAT | TₖₛAₖₛAₖₛT_{ds}G_{ds}A_{ds}^{m}C_{ds}A_{ds}^{m}C_{ds} | 38 | 2237 |
| | | | CCTTG | A_{ds}T_{ds}^{m}C_{ds}^{m}C_{ds}TₖₛTₖₛGₖ | | |
| 936422 | 10695 | 10710 | TATAATGACAC | TₖₛAₖₛTₖₛA_{ds}A_{ds}T_{ds}G_{ds}A_{ds}^{m}C_{ds}A | 47 | 2238 |
| | | | ATCCT | _{ds}^{m}C_{ds}A_{ds}T_{ds}^{m}Cₖₛ^{m}CₖₛTₖ | | |
| 936425 | 11995 | 12010 | GCTCCTAATAA | Gₖₛ^{m}CₖₛTₖₛ^{m}C_{ds}^{m}C_{ds}T_{ds}A_{ds}A_{ds}T_{d} | 68 | 2239 |
| | | | TACAG | sA_{ds}A_{ds}T_{ds}A_{ds}^{m}CₖₛAₖₛGₖ | | |
| 936426 | 11998 | 12013 | TACGCTCCTAA | TₖₛAₖₛ^{m}CₖₛG_{ds}^{m}C_{ds}T_{ds}^{m}C_{ds}^{m}C_{ds}T | 110 | 2240 |
| | | | TAATA | _{ds}A_{ds}A_{ds}T_{ds}A_{ds}AₖₛTₖₛAₖ | | |
| 936429 | 14110 | 14125 | TGTAGAAGTGC | TₖₛGₖₛTₖₛA_{ds}G_{ds}A_{ds}A_{ds}G_{ds}T_{ds}G_{ds} | 43 | 2241 |
| | | | CAGCA | ^{m}C_{ds}^{m}C_{ds}A_{ds}Gₖₛ^{m}CₖₛAₖ | | |

TABLE 31
Reduction of SPDEF RNA by 4 μM modified oligonucleotides

| | SEQ ID | SEQ ID | | | | |
|---|---|---|---|---|---|---|
| | NO: 2 | NO: 2 | | | SPDEF | |
| Compound | Start | Stop | Sequence | Chemistry Notation | (% | SEQ |
| Number | Site | Site | (5′ to 3′) | (5′ to 3′) | UTC) | ID NO |
| 833814 | 12009 | 12024 | ACCAACAGATA | Aₖₛ^{m}CₖₛmCₖₛA_{ds}A_{ds}^{m}C_{ds}A_{ds}G_{ds} | 39 | 993 |
| | | | TACGC | A_{ds}T_{ds}A_{ds}T_{ds}A_{ds}^{m}CₖₛGₖₛ^{m}Cₖ | | |
| 854302 | 8811 | 8826 | TGGATTAAGGC | TₖₛGₖₛGₖₛA_{ds}T_{ds}T_{ds}A_{ds}A_{ds}G_{ds} | 27 | 1715 |
| | | | TCAGC | G_{ds}^{m}C_{ds}T_{ds}mC_{ds}AₖₛGₖₛ^{m}Cₖ | | |
| 936068 | 3531 | 3546 | CAATAAGCAAG | ^{m}CₖₛAₖₛA_{ds}T_{ds}A_{ds}A_{ds}G_{ds}^{m}C_{ds} | 31 | 1129 |
| | | | TCTGG | A_{ds}A_{ds}G_{ds}Tₑₛ^{m}CₑₛTₑₛGₖₛGₖ | | |
| 936069 | 3685 | 3700 | GGTTTTTGCAC | GₖₛGₖₛT_{ds}T_{ds}T_{ds}T_{ds}T_{ds}G_{ds}^{m}C_{ds} | 29 | 1852 |
| | | | TTCCT | A_{ds}^{m}C_{ds}TₑₛTₑₛ^{m}Cₑₛ^{m}CₖₛTₖ | | |
| 936070 | 3795 | 3810 | GGGTTATACTC | GₖₛGₖₛG_{ds}T_{ds}T_{ds}A_{ds}T_{ds}A_{ds}^{m}C_{ds} | 20 | 1358 |
| | | | AGGCT | T_{ds}mC_{ds}AₑₛGₑₛGₑₛ^{m}CₖₛTₖ | | |
| 936071 | 4903 | 4918 | GCCGTCATAAT | Gₖₛ^{m}Cₖₛ^{m}C_{ds}G_{ds}T_{ds}^{m}C_{ds}A_{ds}T_{ds} | 51 | 1353 |
| | | | CCTGG | A_{ds}A_{ds}T_{ds}^{m}Cₑₛ^{m}CₑₛTₑₛGₖₛGₖ | | |
| 936072 | 4906 | 4921 | TGCGCCGTCAT | TₖₛGₖₛ^{m}C_{ds}G_{ds}^{m}C_{ds}^{m}C_{ds}G_{ds}T_{ds} | 77 | 1581 |
| | | | AATCC | ^{m}C_{ds}A_{ds}T_{ds}AₑₛAₑₛTₑₛ^{m}Cₖₛ^{m}Cₖ | | |
| 936073 | 4908 | 4923 | GGTGCGCCGTC | GₖₛGₖₛT_{ds}G_{ds}^{m}C_{ds}G_{ds}^{m}C_{ds}^{m}C_{ds} | 53 | 1658 |
| | | | ATAAT | G_{ds}T_{ds}^{m}C_{ds}AₑₛTₑₛAₑₛAₖₛTₖ | | |
| 936074 | 4910 | 4925 | GTGGTGCGCCG | GₖₛTₖₛG_{ds}G_{ds}T_{ds}G_{ds}^{m}C_{ds}G_{ds}^{m} | 53 | 593 |
| | | | TCATA | C_{ds}^{m}C_{ds}G_{ds}Tₑₛ^{m}CₑₛAₑₛTₖₛAₖ | | |
| 936075 | 5053 | 5068 | CAACTTGCTAC | ^{m}CₖₛAₖₛA_{ds}^{m}C_{ds}T_{ds}T_{ds}G_{ds}^{m}C_{ds} | 57 | 1109 |
| | | | CCCAG | T_{ds}A_{ds}^{m}C_{ds}^{m}Cₑₛ^{m}Cₑₛ^{m}CₑₛAₖₛGₖ | | |
| 936076 | 5772 | 5787 | CCCCGCATACG | ^{m}Cₖₛ^{m}Cₖₛ^{m}C_{ds}^{m}C_{ds}G_{ds}^{m}C_{ds}A_{ds}T_{ds} | 70 | 1707 |
| | | | CCGTA | A_{ds}^{m}C_{ds}G_{ds}^{m}Cₑₛ^{m}CₑₛGₑsTₖₛAₖ | | |
| 936079 | 6361 | 6376 | AGCAAAGGCAT | AₖₛGₖₛ^{m}C_{ds}A_{ds}A_{ds}A_{ds}G_{ds}G_{ds}^{m} | 47 | 678 |
| | | | ACTCC | C_{ds}A_{ds}T_{ds}Aₑₛ^{m}CₑₛTₑₛ^{m}Cₖₛ^{m}Cₖ | | |
| 936080 | 7439 | 7454 | CAGCATGAGTA | ^{m}CₖₛAₖₛG_{ds}^{m}C_{ds}A_{ds}T_{ds}G_{ds}A_{ds} | 59 | 1517 |
| | | | GACGA | G_{ds}T_{ds}A_{ds}GₑₛAₑₛ^{m}CₑₛGₖₛAₖ | | |
| 936081 | 8810 | 8825 | GGATTAAGGCT | GₖₛGₖₛA_{ds}T_{ds}T_{ds}A_{ds}A_{ds}G_{ds}G_{ds}^{m} | 27 | 683 |
| | | | CAGCG | C_{ds}T_{ds}^{m}CₑₛAₑₛGₑₛ^{m}CₖₛGₖ | | |
| 936082 | 8811 | 8826 | TGGATTAAGGC | TₖₛGₖₛG_{ds}A_{ds}T_{ds}T_{ds}A_{ds}A_{ds}G_{ds} | 30 | 1715 |
| | | | TCAGC | G_{ds}^{m}C_{ds}Tₑₛ^{m}CₑₛAₑₛGₖₛ^{m}Cₖ | | |
| 936083 | 9377 | 9392 | GCTTATTAGCA | Gₖₛ^{m}CₖₛT_{ds}T_{ds}A_{ds}T_{ds}T_{ds}A_{ds}G_{ds} | 43 | 1444 |
| | | | GCAGG | ^{m}C_{ds}A_{ds}Gₑₛ^{m}CₑₛAₑₛGₖₛGₖ | | |
| 936084 | 9801 | 9816 | GCTTTATAGAT | Gₖₛ^{m}CₖₛT_{ds}T_{ds}T_{ds}A_{ds}T_{ds}A_{ds}G_{ds} | 40 | 761 |
| | | | GCGGA | A_{ds}T_{ds}Gₑₛ^{m}CₑₛGₑₛGₖₛAₖ | | |
| 936085 | 10157 | 10172 | CCCCACCAAGC | ^{m}Cₖₛ^{m}Cₖₛ^{m}C_{ds}^{m}C_{ds}A_{ds}^{m}C_{ds}^{m}C_{ds} | 74 | 383 |
| | | | CTCGG | A_{ds}A_{ds}G_{ds}^{m}C_{ds}^{m}CₑₛTₑₛ^{m}CₑₛGₖₛ | | |
| | | | | Gₖ | | |
| 936086 | 10172 | 10187 | GCCAAGGAATC | Gₖₛ^{m}Cₖₛ^{m}C_{ds}A_{ds}A_{ds}G_{ds}G_{ds}A_{ds} | 52 | 610 |
| | | | TACTC | A_{ds}T_{ds}^{m}C_{ds}TₑₛAₑₛ^{m}CₑₛTₖₛ^{m}Cₖ | | |
| 936087 | 10272 | 10287 | AGAGAGGTAA | AₖₛGₖₛA_{ds}G_{ds}A_{ds}G_{ds}G_{ds}T_{ds}A_{ds} | 48 | 990 |
| | | | ATCCCC | A_{ds}A_{ds}Tₑₛ^{m}Cₑₛ^{m}Cₑₛ^{m}Cₖₛ^{m}Cₖ | | |
| 936088 | 11641 | 11656 | GACATTTATGG | GₖₛAₖₛ^{m}C_{ds}A_{ds}T_{ds}T_{ds}T_{ds}A_{ds}T_{ds} | 36 | 1893 |
| | | | TGCCC | G_{ds}G_{ds}TₑₛGₑₛ^{m}Cₑₛ^{m}Cₖₛ^{m}Cₖ | | |
| 936108 | 3530 | 3545 | AATAAGCAAGT | AₖₛAₖₛT_{ds}A_{ds}A_{ds}G_{ds}^{m}C_{ds}A_{ds}A_{ds} | 47 | 2242 |
| | | | CTGGT | G_{ds}T_{ds}^{m}CₑₛTₑₛGₑₛGₖₛTₖ | | |
| 936109 | 3684 | 3699 | GTTTTTGCACTT | GₖₛTₖₛT_{ds}T_{ds}T_{ds}T_{ds}G_{ds}^{m}C_{ds}A_{ds} | 54 | 1777 |
| | | | CCTG | ^{m}C_{ds}T_{ds}Tₑₛ^{m}Cₑₛ^{m}CₑₛTₖₛGₖ | | |
| 936110 | 3794 | 3809 | GGTTATACTCA | GₖₛGₖₛT_{ds}T_{ds}A_{ds}T_{ds}A_{ds}^{m}C_{ds}T_{ds} | 25 | 2182 |
| | | | GGCTG | ^{m}C_{ds}A_{ds}GₑₛGₑₛ^{m}CₑₛTₖₛGₖ | | |
| 936111 | 4902 | 4917 | CCGTCATAATC | ^{m}Cₖₛ^{m}CₖₛG_{ds}T_{ds}^{m}C_{ds}A_{ds}T_{ds}A_{ds} | 35 | 1277 |
| | | | CTGGG | A_{ds}T_{ds}^{m}C_{ds}^{m}CₑₛTₑₛGₑₛGₖₛGₖ | | |
| 936112 | 4905 | 4920 | GCGCCGTCATA | Gₖₛ^{m}CₖₛG_{ds}^{m}C_{ds}^{m}C_{ds}G_{ds}T_{ds}^{m}C_{ds} | 46 | 1505 |
| | | | ATCCT | A_{ds}T_{ds}A_{ds}AₑₛTₑₛ^{m}Cₑₛ^{m}CₖₛTₖ | | |
| 936113 | 4907 | 4922 | GTGCGCCGTCA | GₖₛTₖₛG_{ds}^{m}C_{ds}G_{ds}^{m}C_{ds}^{m}C_{ds}G_{ds} | 80 | 2243 |
| | | | TAATC | T_{ds}^{m}C_{ds}A_{ds}TₑₛAₑₛAₑₛTₖₛ^{m}Cₖ | | |
| 936114 | 4909 | 4924 | TGGTGCGCCGT | TₖₛGₖₛG_{ds}T_{ds}G_{ds}^{m}C_{ds}G_{ds}^{m}C_{ds}^{m} | 51 | 517 |
| | | | CATAA | C_{ds}G_{ds}T_{ds}^{m}CₑₛAₑₛTₑₛAₖₛAₖ | | |
| 936115 | 5052 | 5067 | AACTTGCTACC | AₖₛAₖₛ^{m}C_{ds}T_{ds}T_{ds}G_{ds}^{m}C_{ds}T_{ds} | 43 | 1033 |
| | | | CCAGG | A_{ds}^{m}C_{ds}^{m}C_{ds}^{m}Cₑₛ^{m}CₑₛAₑₛGₖₛGₖ | | |
| 936116 | 5771 | 5786 | CCCGCATACGC | ^{m}Cₖₛ^{m}Cₖₛ^{m}C_{ds}G_{ds}^{m}C_{ds}A_{ds}T_{ds}A_{ds} | 59 | 1513 |
| | | | CGTAC | ^{m}C_{ds}G_{ds}^{m}C_{ds}^{m}CₑₛGₑₛTₑₛAₖₛ^{m}Cₖ | | |
| 936117 | 5773 | 5788 | GCCCCGCATAC | Gₖₛ^{m}Cₖₛ^{m}C_{ds}^{m}C_{ds}^{m}C_{ds}G_{ds}^{m}C_{ds} | 47 | 450 |
| | | | GCCGT | A_{ds}T_{ds}A_{ds}^{m}C_{ds}Gₑₛ^{m}Cₑₛ^{m}CₑₛGₖₛ | | |
| | | | | Tₖ | | |
| 936119 | 6360 | 6375 | GCAAAGGCATA | Gₖₛ^{m}CₖₛA_{ds}A_{ds}A_{ds}G_{ds}G_{ds}^{m}C_{ds} | 41 | 2244 |
| | | | CTCCA | A_{ds}T_{ds}A_{ds}^{m}CₑₛTₑₛ^{m}Cₑₛ^{m}CₖₛAₖ | | |
| 936120 | 7438 | 7453 | AGCATGAGTAG | AₖₛGₖₛ^{m}C_{ds}A_{ds}T_{ds}G_{ds}A_{ds}G_{ds}T_{ds} | 68 | 1866 |
| | | | ACGAG | A_{ds}G_{ds}Aₑₛ^{m}CₑₛGₑₛAₖₛGₖ | | |
| 936121 | 8809 | 8824 | GATTAAGGCTC | GₖₛAₖₛT_{ds}T_{ds}A_{ds}A_{ds}G_{ds}G_{ds}^{m}C_{ds} | 39 | 2245 |
| | | | AGCGT | T_{ds}^{m}C_{ds}AₑₛGₑₛ^{m}CₑₛGₖₛTₖ | | |
| 936122 | 9376 | 9391 | CTTATTAGCAG | ^{m}CₖₛTₖₛT_{ds}A_{ds}T_{ds}T_{ds}A_{ds}G_{ds}^{m}C_{ds} | 46 | 2221 |
| | | | CAGGG | A_{ds}G_{ds}^{m}CₑₛAₑₛGₑₛGₖₛGₖ | | |
| 936123 | 9800 | 9815 | CTTTATAGATG | ^{m}CₖₛTₖₛT_{ds}T_{ds}A_{ds}T_{ds}A_{ds}G_{ds}A_{ds} | 45 | 2229 |
| | | | CGGAC | T_{ds}G_{ds}^{m}CₑₛGₑₛGₑₛAₖₛ^{m}Cₖ | | |
| 936124 | 10156 | 10171 | CCCACCAAGCC | ^{m}Cₖₛ^{m}Cₖₛ^{m}C_{ds}A_{ds}^{m}C_{ds}^{m}C_{ds}Adₛ | 47 | 2246 |
| | | | TCGGT | A_{ds}G_{ds}^{m}C_{ds}^{m}C_{ds}Tₑₛ^{m}CₑₛGₑₛGₖₛ | | |
| | | | | Tₖ | | |
| 936125 | 10171 | 10186 | CCAAGGAATCT | ^{m}Cₖₛ^{m}CₖₛA_{ds}A_{ds}G_{ds}G_{ds}A_{ds}A_{ds} | 59 | 1734 |
| | | | ACTCC | T_{ds}^{m}C_{ds}T_{ds}Aₑₛ^{m}CₑₛTₑₛ^{m}Cₖₛ^{m}Cₖ | | |
| 936126 | 10271 | 10286 | GAGAGGTAAAT | GₖₛAₖₛG_{ds}A_{ds}G_{ds}G_{ds}T_{ds}A_{ds}A_{ds} | 55 | 2233 |
| | | | CCCCA | A_{ds}T_{ds}^{m}Cₑₛ^{m}Cₑₛ^{m}Cₑₛ^{m}CₖₛAₖ | | |
| 936127 | 11640 | 11655 | ACATTTATGGT | Aₖₛ^{m}CₖₛA_{ds}T_{ds}T_{ds}T_{ds}A_{ds}T_{ds} | 43 | 992 |
| | | | GCCCT | G_{ds}G_{ds}T_{ds}Gₑₛ^{m}Cₑₛ^{m}Cₑₛ^{m}CₖₛTₖ | | |
| 936146 | 3532 | 3547 | GCAATAAGCAA | Gₖₛ^{m}CₖₛA_{ds}A_{ds}T_{ds}A_{ds}A_{ds}G_{ds}^{m} | 42 | 2247 |
| | | | GTCTG | C_{ds}A_{ds}A_{ds}GₑₛTₑₛ^{m}CₑₛTₖₛGₖ | | |
| 936147 | 3686 | 3701 | CGGTTTTTGCA | ^{m}CₖₛGₖₛG_{ds}T_{ds}T_{ds}T_{ds}T_{ds}T_{ds}G_{ds} | 27 | 1928 |
| | | | CTTCC | ^{m}C_{ds}A_{ds}^{m}CₑₛTₑₛTₑₛ^{m}Cₖₛ^{m}Cₖ | | |
| 936148 | 3796 | 3811 | CGGGTTATACT | ^{m}CₖₛGₖₛG_{ds}G_{ds}T_{ds}T_{ds}A_{ds}T_{ds}A_{ds} | 10 | 2183 |
| | | | CAGGC | ^{m}C_{ds}T_{ds}^{m}CₑₛAₑₛGₑₛGₖₛ^{m}Cₖ | | |
| 936149 | 4904 | 4919 | CGCCGTCATAA | ^{m}CₖₛGₖₛ^{m}C_{ds}^{m}C_{ds}G_{ds}T_{ds}^{m}C_{ds}A_{ds} | 71 | 1429 |
| | | | TCCTG | T_{ds}A_{ds}A_{ds}Tₑₛ^{m}Cₑₛ^{m}CₑₛTₖₛGₖ | | |
| 936150 | 4911 | 4926 | GGTGGTGCGCC | GₖₛGₖₛT_{ds}G_{ds}G_{ds}T_{ds}G_{ds}^{m}C_{ds}G_{ds} | 40 | 669 |
| | | | GTCAT | ^{m}C_{ds}^{m}C_{ds}GₑₛTₑₛ^{m}CₑₛAₖₛTk | | |
| 936151 | 5054 | 5069 | GCAACTTGCTA | Gₖₛ^{m}CₖₛA_{ds}A_{ds}^{m}C_{ds}T_{ds}T_{ds}G_{ds}^{m} | 42 | 1186 |
| | | | CCCCA | C_{ds}T_{ds}A_{ds}^{m}Cₑₛ^{m}Cₑₛ^{m}Cₑₛ^{m}CₖₛAₖ | | |
| 936154 | 6362 | 6377 | AAGCAAAGGC | AₖₛAₖₛG_{ds}^{m}C_{ds}A_{ds}A_{ds}A_{ds}G_{ds}G_{ds} | 44 | 2248 |
| | | | ATACTC | ^{m}C_{ds}A_{ds}TₑₛAₑₛ^{m}CₑₛTₖₛ^{m}Cₖ | | |
| 936155 | 7440 | 7455 | TCAGCATGAGT | Tₖₛ^{m}CₖₛA_{ds}G_{ds}^{m}C_{ds}A_{ds}T_{ds}G_{ds}A_{ds} | 63 | 1942 |
| | | | AGACG | G_{ds}T_{ds}AₑₛGₑₛAₑₛ^{m}CₖₛGₖ | | |
| 936156 | 8812 | 8827 | CTGGATTAAGG | ^{m}CₖₛTₖₛG_{ds}G_{ds}A_{ds}T_{ds}T_{ds}A_{ds}A_{ds} | 53 | 759 |
| | | | CTCAG | G_{ds}G_{ds}^{m}CₑₛTₑₛ^{m}CₑₛAₖₛGₖ | | |
| 936157 | 9378 | 9393 | TGCTTATTAGC | TₖₛGₖₛ^{m}C_{ds}T_{ds}T_{ds}A_{ds}T_{ds}T_{ds}A_{ds} | 59 | 2222 |
| | | | AGCAG | G_{ds}^{m}C_{ds}AₑₛGₑₛ^{m}CₑₛAₖₛGₖ | | |
| 936158 | 9802 | 9817 | TGCTTTATAGA | TₖₛGₖₛ^{m}C_{ds}T_{ds}T_{ds}T_{ds}A_{ds}T_{ds}A_{ds} | 28 | 2230 |
| | | | TGCGG | G_{ds}A_{ds}TₑₛGₑₛ^{m}CₑₛGₖₛGₖ | | |
| 936159 | 10158 | 10173 | TCCCCACCAAG | Tₖₛ^{m}Cₖₛ^{m}C_{ds}^{m}C_{ds}^{m}C_{ds}A_{ds}^{m}C_{ds}^{m} | 63 | 2249 |
| | | | CCTCG | C_{ds}A_{ds}A_{ds}G_{ds}^{m}Cₑₛ^{m}CₑₛTₑₛ^{m}Cₖₛ | | |
| | | | | Gₖ | | |
| 936160 | 10173 | 10188 | TGCCAAGGAAT | TₖₛGₖₛ^{m}C_{ds}^{m}C_{ds}A_{ds}A_{ds}G_{ds}G_{ds}A_{ds} | 50 | 1810 |
| | | | CTACT | A_{ds}T_{ds}^{m}CₑₛTₑₛAₑₛ^{m}CₖₛTₖ | | |
| 936161 | 10273 | 10288 | CAGAGAGGTAA | ^{m}CₖₛAₖₛG_{ds}A_{ds}G_{ds}A_{ds}G_{ds}G_{ds}T_{ds} | 65 | 2234 |
| | | | ATCCC | A_{ds}A_{ds}AₑₛTₑₛ^{m}Cₑₛ^{m}Cₖₛ^{m}Cₖ | | |
| 936431 | 14113 | 14128 | GTGTGTAGAAG | GₖₛTₖₛGₖₛT_{ds}G_{ds}T_{ds}A_{ds}G_{ds}A_{ds} | 46 | 2250 |
| | | | TGCCA | A_{ds}G_{ds}T_{ds}G_{ds}^{m}Cₖₛ^{m}CₖₛAₖ | | |
| 936432 | 14114 | 14129 | TGTGTGTAGAA | TₖₛGₖₛTₖₛG_{ds}T_{ds}G_{ds}T_{ds}A_{ds}G_{ds} | 61 | 2251 |
| | | | GTGCC | A_{ds}A_{ds}G_{ds}T_{ds}Gₖₛ^{m}Cₖₛ^{m}Cₖ | | |
| 936434 | 14116 | 14131 | ACTGTGTGTAG | Aₖₛ^{m}CₖₛTₖₛG_{ds}T_{ds}G_{ds}T_{ds}G_{ds}T_{ds} | 113 | 2252 |
| | | | AAGTG | A_{ds}G_{ds}A_{ds}A_{ds}GₖₛTₖₛGₖ | | |
| 936435 | 14117 | 14132 | GACTGTGTGTA | GₖₛAₖₛ^{m}CₖₛT_{ds}G_{ds}T_{ds}G_{ds}T_{ds}G_{ds} | 81 | 2253 |
| | | | GAAGT | T_{ds}A_{ds}G_{ds}A_{ds}AₖₛGₖₛTₖ | | |
| 936441 | 14209 | 14224 | ATATCATCCAG | AₖₛTₖₛAₖₛT_{ds}^{m}C_{ds}A_{ds}T_{ds}^{m}C_{ds}^{m} | 81 | 2254 |
| | | | CACCT | C_{ds}A_{ds}G_{ds}^{m}C_{ds}A_{ds}^{m}Cₖₛ^{m}CₖₛTₖ | | |
| 936442 | 14214 | 14229 | AATTCATATCA | AₖₛAₖₛTₖₛT_{ds}^{m}C_{ds}A_{ds}T_{ds}A_{ds}T_{ds} | 36 | 2255 |
| | | | TCCAG | ^{m}C_{ds}A_{ds}T_{ds}^{m}C_{ds}^{m}CₖₛAₖₛGₖ | | |
| 936444 | 14221 | 14236 | GAGCTTGAATT | GₖₛAₖₛGₖₛ^{m}C_{ds}T_{ds}T_{ds}G_{ds}A_{ds}A_{ds} | 73 | 2256 |
| | | | CATAT | T_{ds}T_{ds}^{m}C_{ds}A_{ds}TₖₛAₖₛTₖ | | |
| 936446 | 14675 | 14690 | GATGGATTGAT | GₖₛAₖₛTₖₛG_{ds}G_{ds}A_{ds}T_{ds}T_{ds}G_{ds} | 55 | 2257 |
| | | | GAGCA | A_{ds}T_{ds}G_{ds}A_{ds}Gₖₛ^{m}CₖₛAₖ | | |
| 936447 | 14676 | 14691 | GGATGGATTGA | GₖₛGₖₛAₖₛT_{ds}G_{ds}G_{ds}A_{ds}T_{ds}T_{ds} | 57 | 2258 |
| | | | TGAGC | G_{ds}A_{ds}T_{ds}G_{ds}AₖₛGₖₛ^{m}Cₖ | | |
| 936449 | 15382 | 15397 | TTCGGCCCAGA | TₖₛTₖₛmCₖₛG_{ds}G_{ds}mC_{ds}mC_{ds}mC_{ds} | 73 | 2259 |
| | | | GAGGT | A_{ds}G_{ds}A_{ds}G_{ds}A_{ds}GₖₛGₖₛTₖ | | |
| 936450 | 15383 | 15398 | TTTCGGCCCAG | TₖₛTₖₛTₖₛ^{m}C_{ds}G_{ds}G_{ds}^{m}C_{ds}^{m}C_{ds}^{m} | 77 | 2260 |
| | | | AGAGG | C_{ds}A_{ds}G_{ds}A_{ds}G_{ds}AₖₛGₖₛGₖ | | |
| 936451 | 15384 | 15399 | TTTTCGGCCCA | TₖₛTₖₛTₖₛT_{ds}^{m}C_{ds}G_{ds}G_{ds}^{m}C_{ds}^{m} | 78 | 2261 |
| | | | GAGAG | C_{ds}^{m}C_{ds}A_{ds}G_{ds}A_{ds}GₖₛAₖₛGₖ | | |
| 936452 | 15385 | 15400 | CTTTTCGGCCC | ^{m}CₖₛTₖₛTₖₛT_{ds}T_{ds}^{m}C_{ds}G_{ds}G_{ds}^{m} | 51 | 2262 |
| | | | AGAGA | C_{ds}^{m}C_{ds}^{m}C_{ds}A_{ds}G_{ds}AₖₛGₖₛAₖ | | |
| 936453 | 15386 | 15401 | GCTTTTCGGCC | Gₖₛ^{m}CₖₛTₖₛT_{ds}T_{ds}T_{ds}mC_{ds}G_{ds} | 36 | 2263 |
| | | | CAGAG | G_{ds}^{m}C_{ds}^{m}C_{ds}^{m}C_{ds}A_{ds}GₖₛAₖₛGₖ | | |
| 936454 | 15388 | 15403 | CTGCTTTTCGG | ^{m}CₖₛTₖₛGₖₛ^{m}C_{ds}T_{ds}T_{ds}T_{ds}T_{ds}^{m} | 41 | 2264 |
| | | | CCCAG | C_{ds}G_{ds}G_{ds}^{m}C_{ds}^{m}C_{ds}^{m}CₖₛAₖₛGₖ | | |
| 936455 | 15389 | 15404 | ACTGCTTTTCG | AₖₛmCₖₛTₖₛG_{ds}^{m}C_{ds}T_{ds}T_{ds}T_{ds}T_{ds} | 43 | 2265 |
| | | | GCCCA | ^{m}C_{ds}G_{ds}G_{ds}^{m}C_{ds}^{m}Cₖₛ^{m}CₖₛAₖ | | |
| 936456 | 15390 | 15405 | AACTGCTTTTC | AₖₛAₖₛ^{m}CₖₛT_{ds}G_{ds}^{m}C_{ds}T_{ds}T_{ds} | 36 | 2266 |
| | | | GGCCC | T_{ds}T_{ds}^{m}C_{ds}G_{ds}G_{ds}^{m}Cₖₛ^{m}Cₖₛ^{m}Cₖ | | |
| 936457 | 15391 | 15406 | GAACTGCTTTT | GₖₛAₖₛAₖₛ^{m}C_{ds}T_{ds}G_{ds}^{m}C_{ds}T_{ds} | 46 | 2267 |
| | | | CGGCC | T_{ds}T_{ds}T_{ds}^{m}C_{ds}G_{ds}Gₖₛ^{m}Cₖₛ^{m}Cₖ | | |
| 936458 | 15392 | 15407 | GGAACTGCTTT | GₖₛGₖₛAₖₛA_{ds}^{m}C_{ds}T_{ds}G_{ds}^{m}C_{ds} | 28 | 2268 |
| | | | TCGGC | T_{ds}T_{ds}T_{ds}T_{ds}^{m}C_{ds}GₖₛGₖₛ^{m}Cₖ | | |
| 936480 | 17621 | 17636 | TACTGTGGTGT | TₖₛAₖₛ^{m}CₖₛT_{ds}G_{ds}T_{ds}G_{ds}G_{ds}T_{ds} | 72 | 2269 |
| | | | GCAGA | G_{ds}T_{ds}G_{ds}^{m}C_{ds}AₖₛGₖₛAₖ | | |
| 936481 | 17622 | 17637 | ATACTGTGGTG | AₖₛTₖₛAₖₛ^{m}C_{ds}T_{ds}G_{ds}T_{ds}G_{ds}G_{ds} | 68 | 2270 |
| | | | TGCAG | T_{ds}G_{ds}T_{ds}G_{ds}^{m}CₖₛAₖₛGₖ | | |
| 936482 | 17623 | 17638 | CATACTGTGGT | ^{m}CₖₛAₖₛTₖₛA_{ds}^{m}C_{ds}T_{ds}G_{ds}T_{ds}G_{ds} | 43 | 2271 |
| | | | GTGCA | G_{ds}T_{ds}G_{ds}T_{ds}Gₖₛ^{m}CₖₛAₖ | | |
| 936485 | 17627 | 17642 | AAGACATACTG | AₖₛAₖₛGₖₛA_{ds}^{m}C_{ds}A_{ds}T_{ds}A_{ds}^{m} | 45 | 2272 |
| | | | TGGTG | C_{ds}T_{ds}G_{ds}T_{ds}G_{ds}GₖₛTₖₛGₖ | | |
| 936488 | 17637 | 17652 | GGCAATACCCA | GₖₛGₖₛ^{m}CₖₛA_{ds}A_{ds}T_{ds}A_{ds}^{m}C_{ds}^{m} | 45 | 2273 |
| | | | AGACA | C_{ds}^{m}C_{ds}A_{ds}A_{ds}G_{ds}Aₖₛ^{m}CₖₛAₖ | | |

TABLE 32
Reduction of SPDEF RNA by 4 μM modified oligonucleotides

| | SEQ | SEQ | SEQ | SEQ | | | | |
|---|---|---|---|---|---|---|---|---|
| | ID | ID | ID | ID | | | | |
| | NO: 1 | NO: 1 | NO: 2 | NO: 2 | | | | SEQ |
| Compound | Start | Stop | Start | Stop | Sequence | Chemistry Notation | (% | ID |
| Number | Site | Site | Site | Site | (5′ to 3′) | (5′ to 3′) | UTC) | NO |
| 833814 | N/A | N/A | 12009 | 12024 | ACCAACA | Aₖₛ^{m}Cₖₛ^{m}CₖₛA_{ds}A_{ds}^{m}C_{ds}A_{ds}G_{ds} | 42 | 993 |
| | | | | | GATATAC | A_{ds}T_{ds}A_{ds}T_{ds}A_{ds}^{m}CₖₛGₖₛ^{m}Cₖ | | |
| | | | | | GC | | | |
| 854302 | N/A | N/A | 8811 | 8826 | TGGATTA | TₖₛGₖₛGₖₛA_{ds}T_{ds}T_{ds}A_{ds}A_{ds}G_{ds} | 34 | 1715 |
| | | | | | AGGCTCA | G_{ds}^{m}C_{ds}T_{ds}^{m}C_{ds}AₖₛGₖₛ^{m}Cₖ | | |
| | | | | | GC | | | |
| 936089 | N/A | N/A | 12004 | 12019 | CAGATAT | ^{m}CₖₛAₖₛG_{ds}A_{ds}T_{ds}A_{ds}T_{ds}A_{ds}^{m} | | |
| | | | | | ACGCTCCT | C_{ds}G_{ds}^{m}C_{ds}Tₑₛ^{m}Cₑₛ^{m}CₑₛTₖₛAₖ | 40 | 1895 |
| | | | | | A | | | |
| 936090 | N/A | N/A | 12006 | 12021 | AACAGAT | AₖₛAₖₛ^{m}C_{ds}A_{ds}G_{ds}A_{ds}T_{ds}A_{ds}T_{ds} | | |
| | | | | | ATACGCTC | A_{ds}^{m}C_{ds}Gₑₛ^{m}CₑₛTₑₛ^{m}Cₖₛ^{m}Cₖ | 60 | 1971 |
| | | | | | C | | | |
| 936091 | 492 | 507 | 13603 | 13618 | GCGACAC | Gₖₛ^{m}CₖₛG_{ds}A_{ds}^{m}C_{ds}A_{ds}^{m}C_{ds}^{m}C_{ds} | 58 | 255 |
| | | | | | CGTGTCG | G_{ds}T_{ds}G_{ds}Tₑₛ^{m}CₑₛGₑₛGₖₛGₖ | | |
| | | | | | GG | | | |
| 936092 | 498 | 513 | 13609 | 13624 | CTGTCCGC | ^{m}CₖₛTₖₛG_{ds}T_{ds}^{m}C_{ds}^{m}C_{ds}G_{ds}^{m}C_{ds} | 63 | 1089 |
| | | | | | GACACCG | G_{ds}A_{ds}^{m}C_{ds}Aₑₛ^{m}Cₑₛ^{m}CₑₛGₖₛTₖ | | |
| | | | | | T | | | |
| 936093 | 810 | 825 | 13921 | 13936 | GCACTTCG | Gₖₛ^{m}CₖₛA_{ds}^{m}C_{ds}T_{ds}T_{ds}^{m}C_{ds}G_{ds} | 57 | 563 |
| | | | | | CCCACCA | ^{m}C_{ds}^{m}C_{ds}^{m}C_{ds}Aₑₛ^{m}Cₑₛ^{m}CₑₛAₖₛ^{m} | | |
| | | | | | C | Cₖ | | |
| 936094 | 829 | 844 | 13940 | 13955 | GCCGTCTC | Gₖₛ^{m}Cₖₛ^{m}C_{ds}G_{ds}T_{ds}^{m}C_{ds}T_{ds}^{m}C_{ds} | 64 | 1552 |
| | | | | | GATGTCCT | G_{ds}A_{ds}T_{ds}GₑₛTₑₛ^{m}Cₑₛ^{m}CₖₛTₖ | | |
| 936096 | N/A | N/A | 14213 | 14228 | ATTCATAT | AₖₛTₖₛT_{ds}^{m}C_{ds}A_{ds}T_{ds}A_{ds}T_{ds}^{m}C_{ds} | 33 | 1606 |
| | | | | | CATCCAG | A_{ds}T_{ds}MCₑₛ^{m}CₑₛAₑₛGₖₛ^{m}Cₖ | | |
| | | | | | C | | | |
| 936097 | N/A | N/A | 14215 | 14230 | GAATTCAT | GₖₛAₖₛA_{ds}T_{ds}T_{ds}^{m}C_{ds}A_{ds}T_{ds}A_{ds} | 39 | 1682 |
| | | | | | ATCATCCA | T_{ds}^{m}C_{ds}AₑₛTₑₛ^{m}Cₑₛ^{m}CₖₛAₖ | | |
| 936098 | N/A | N/A | 15387 | 15402 | TGCTTTTC | TₖₛGₖₛ^{m}C_{ds}T_{ds}T_{ds}T_{ds}T_{ds}^{m}C_{ds}G_{ds} | 47 | 999 |
| | | | | | GGCCCAG | G_{ds}^{m}C_{ds}^{m}Cₑₛ^{m}CₑₛAₑₛGₖₛAₖ | | |
| | | | | | A | | | |
| 936099 | N/A | N/A | 16598 | 16613 | TGAACTTG | TₖₛGₖₛA_{ds}A_{ds}^{m}C_{ds}T_{ds}T_{ds}G_{ds}G_{ds} | 60 | 1686 |
| | | | | | GTTCAGG | T_{ds}T_{ds}^{m}CₑₛAₑₛGₑₛGₖₛGₖ | | |
| | | | | | G | | | |
| 936100 | N/A | N/A | 17291 | 17306 | ACGGTTGT | Aₖₛ^{m}CₖₛG_{ds}G_{ds}T_{ds}T_{ds}G_{ds}T_{ds}^{m}C_{ds} | 33 | 2056 |
| | | | | | CCCCAGCT | ^{m}C_{ds}^{m}C_{ds}^{m}CₑₛAₑₛGₑₛ^{m}CₖₛTₖ | | |
| 936101 | N/A | N/A | 17292 | 17307 | CACGGTT | ^{m}CₖₛAₖₛ^{m}C_{ds}G_{ds}G_{ds}T_{ds}T_{ds}G_{ds}T_{ds} | 54 | 163 |
| | | | | | GTCCCCA | ^{m}C_{ds}^{m}C_{ds}^{m}Cₑₛ^{m}CₑₛAₑₛGₖₛ^{m}Cₖ | | |
| | | | | | GC | | | |
| 936102 | N/A | N/A | 17303 | 17318 | TTCCTAGT | TₖₛTₖₛ^{m}C_{ds}^{m}C_{ds}T_{ds}A_{ds}G_{ds}T_{ds}A_{ds} | 32 | 1754 |
| | | | | | ATCCACG | T_{ds}^{m}C_{ds}^{m}CₑₛAₑₛ^{m}CₑₛGₖₛGₖ | | |
| | | | | | G | | | |
| 936103 | N/A | N/A | 17305 | 17320 | ACTTCCTA | Aₖₛ^{m}CₖₛT_{ds}T_{ds}^{m}C_{ds}^{m}C_{ds}T_{ds}A_{ds} | 57 | 1906 |
| | | | | | GTATCCAC | G_{ds}T_{ds}A_{ds}Tₑₛ^{m}Cₑₛ^{m}CₑₛAₖₛ^{m}Cₖ | | |
| 936104 | N/A | N/A | 17493 | 17508 | AACTTGTA | AₖₛAₖₛ^{m}C_{ds}T_{ds}T_{ds}G_{ds}T_{ds}A_{ds}A_{ds} | 26 | 2059 |
| | | | | | ACAGTGG | ^{m}C_{ds}A_{ds}GₑₛTₑₛGₑₛGₖₛTₖ | | |
| | | | | | T | | | |
| 936105 | N/A | N/A | 17525 | 17540 | TTCATAGA | TₖₛTₖₛ^{m}C_{ds}A_{ds}T_{ds}A_{ds}G_{ds}A_{ds}^{m}C_{ds} | 71 | 240 |
| | | | | | CTTTCCCT | T_{ds}T_{ds}Tₑₛ^{m}Cₑₛ^{m}Cₑₛ^{m}CₖₛTₖ | | |
| 936106 | 1747 | 1762 | 20032 | 20047 | TGTCGAGT | TₖₛGₖₛT_{ds}^{m}C_{ds}G_{ds}A_{ds}G_{ds}T_{ds}^{m}C_{ds} | 37 | 727 |
| | | | | | CACTGCCC | A_{ds}^{m}C_{ds}TₑₛGₑₛ^{m}Cₑₛ^{m}Cₖₛ^{m}Cₖ | | |
| 936107 | 1894 | 1909 | 20179 | 20194 | TCTCTAGT | Tₖₛ^{m}CₖₛT_{ds}^{m}C_{ds}T_{ds}A_{ds}G_{ds}T_{ds}A_{ds} | 65 | 364 |
| | | | | | ATCTTTAT | T_{ds}^{m}C_{ds}TₑₛTₑₛTₑₛAₖₛTₖ | | |
| 936128 | N/A | N/A | 12003 | 12018 | AGATATA | AₖₛGₖₛA_{ds}T_{ds}A_{ds}T_{ds}A_{ds}^{m}C_{ds}G_{ds} | 41 | 1819 |
| | | | | | CGCTCCTA | ^{m}C_{ds}T_{ds}^{m}Cₑₛ^{m}CₑₛTₑₛAₖₛAₖ | | |
| | | | | | A | | | |
| 936129 | N/A | N/A | 12005 | 12020 | ACAGATA | AₖₛGₖₛA_{ds}T_{ds}A_{ds}T_{ds}A_{ds}^{m}C_{ds}G_{ds} | | |
| | | | | | TACGCTCC | ^{m}C_{ds}G_{ds}^{m}CₑₛTₑₛ^{m}Cₑₛ^{m}CₖₛTₖ | 55 | 917 |
| | | | | | T | | | |
| 936130 | 491 | 506 | 13602 | 13617 | CGACACC | ^{m}CₖₛGₖₛA_{ds}^{m}C_{ds}A_{ds}^{m}C_{ds}^{m}C_{ds}G_{ds} | 70 | 2274 |
| | | | | | GTGTCGG | T_{ds}G_{ds}T_{ds}^{m}CₑₛGₑₛGₑₛGₖₛGₖ | | |
| | | | | | GG | | | |
| 936131 | 497 | 512 | 13608 | 13623 | TGTCCGCG | TₖₛGₖₛT_{ds}^{m}C_{ds}^{m}C_{ds}G_{ds}^{m}C_{ds}G_{ds} | 74 | 1014 |
| | | | | | ACACCGT | A_{ds}^{m}C_{ds}A_{ds}^{m}Cₑₛ^{m}CₑₛGₑₛTₖₛGₖ | | |
| | | | | | G | | | |
| 936132 | 809 | 824 | 13920 | 13935 | CACTTCGC | ^{m}CₖₛAₖₛ^{m}C_{ds}T_{ds}T_{ds}^{m}C_{ds}G_{ds}^{m}C_{ds} | 59 | 487 |
| | | | | | CCACCAC | ^{m}C_{ds}^{m}C_{ds}A_{ds}^{m}Cₑₛ^{m}CₑₛAₑₛ^{m}Cₖₛ | | |
| | | | | | C | ^{m}Cₖ | | |
| 936133 | 828 | 843 | 13939 | 13954 | CCGTCTCG | ^{m}Cₖₛ^{m}CₖₛG_{ds}T_{ds}^{m}C_{ds}T_{ds}^{m}C_{ds}G_{ds} | 57 | 37 |
| | | | | | ATGTCCTT | A_{ds}T_{ds}G_{ds}Tₑₛ^{m}Cₑₛ^{m}CₑₛTₖₛTₖ | | |
| 936135 | N/A | N/A | 14212 | 14227 | TTCATATC | TₖₛTₖₛ^{m}C_{ds}A_{ds}T_{ds}A_{ds}T_{ds}^{m}C_{ds}G_{ds} | 24 | 2275 |
| | | | | | ATCCAGC | T_{ds}^{m}C_{ds}^{m}CₑₛAₑₛGₑₛ^{m}CₖₛAₖ | | |
| | | | | | A | | | |
| 936136 | N/A | N/A | 14214 | 14229 | AATTCATA | AₖₛAₖₛT_{ds}T_{ds}^{m}C_{ds}A_{ds}T_{ds}A_{ds}T_{ds} | 53 | 2255 |
| | | | | | TCATCCAG | ^{m}C_{ds}A_{ds}Tₑₛ^{m}Cₑₛ^{m}CₑₛAₖₛGₖ | | |
| 936137 | N/A | N/A | 15386 | 15401 | GCTTTTCG | Gₖₛ^{m}CₖₛT_{ds}T_{ds}T_{ds}T_{ds}^{m}C_{ds}G_{ds}G_{ds} | 31 | 2263 |
| | | | | | GCCCAGA | ^{m}C_{ds}^{m}C_{ds}^{m}CₑₛAₑₛGₑₛAₖₛGₖ | | |
| | | | | | G | | | |
| 936138 | N/A | N/A | 16597 | 16612 | GAACTTG | GₖₛAₖₛA_{ds}^{m}C_{ds}T_{ds}T_{ds}G_{ds}G_{ds} | 46 | 2276 |
| | | | | | GTTCAGG | T_{ds}T_{ds}^{m}C_{ds}AₑₛGₑₛGₑₛGₖₛ^{m}Cₖ | | |
| | | | | | GC | | | |
| 936139 | N/A | N/A | 17290 | 17305 | CGGTTGTC | ^{m}CₖₛGₖₛG_{ds}T_{ds}T_{ds}G_{ds}T_{ds}^{m}C_{ds}^{m} | 32 | 2277 |
| | | | | | CCCAGCTC | C_{ds}^{m}C_{ds}^{m}C_{ds}AₑₛGₑₛ^{m}CₑₛTₖₛ^{m}Cₖ | | |
| 936140 | N/A | N/A | 17302 | 17317 | TCCTAGTA | Tₖₛ^{m}Cₖₛ^{m}C_{ds}T_{ds}A_{ds}G_{ds}T_{ds}A_{ds}T_{ds} | 47 | 1230 |
| | | | | | TCCACGGT | ^{m}C_{ds}^{m}C_{ds}Aₑₛ^{m}CₑₛGₑₛGₖₛTₖ | | |
| 936141 | N/A | N/A | 17304 | 17319 | CTTCCTAG | ^{m}CₖₛTₖₛT_{ds}^{m}C_{ds}^{m}C_{ds}T_{ds}A_{ds}G_{ds} | 38 | 1830 |
| | | | | | TATCCACG | T_{ds}A_{ds}T_{ds}^{m}Cₑₛ^{m}CₑₛAₑₛ^{m}CₖₛGₖ | | |
| 936142 | N/A | N/A | 17492 | 17507 | ACTTGTAA | Aₖₛ^{m}CₖₛT_{ds}T_{ds}G_{ds}T_{ds}A_{ds}A_{ds}^{m}C_{ds} | 21 | 1983 |
| | | | | | CAGTGGTT | A_{ds}G_{ds}TₑₛGₑₛGₑₛTₖₛTₖ | | |
| 936143 | N/A | N/A | 17524 | 17539 | TCATAGA | Tₖₛ^{m}CₖₛA_{ds}T_{ds}A_{ds}G_{ds}Ad^{m}C_{ds}T_{ds} | 47 | 2278 |
| | | | | | CTTTCCCT | T_{ds}T_{ds}^{m}Cₑₛ^{m}Cₑₛ^{m}CₑₛTₖₛGₖ | | |
| | | | | | G | | | |
| 936144 | 1746 | 1761 | 20031 | 20046 | GTCGAGT | GₖₛTₖₛ^{m}C_{ds}G_{ds}A_{ds}G_{ds}T_{ds}^{m}C_{ds} | 43 | 58 |
| | | | | | CACTGCCC | A_{ds}^{m}C_{ds}T_{ds}Gₑₛ^{m}Cₑₛ^{m}Cₑₛ^{m}Cₑₛ^{m}Cₖₛ | | |
| | | | | | T | Tₖ | | |
| 936145 | 1893 | 1908 | 20178 | 20193 | CTCTAGTA | ^{m}CₖₛTₖₛ^{m}C_{ds}T_{ds}A_{ds}G_{ds}T_{ds}A_{ds}T_{ds} | 61 | 2279 |
| | | | | | TCTTTATT | ^{m}C_{ds}T_{ds}TₑₛTₑₛAₑₛTₖₛTₖ | | |
| 936162 | N/A | N/A | 11642 | 11657 | TGACATTT | TₖₛkGₖₛA_{ds}^{m}C_{ds}A_{ds}T_{ds}T_{ds}T_{ds}A_{ds} | 51 | 1068 |
| | | | | | ATGGTGC | T_{ds}G_{ds}GₑₛTₑₛGₑₛ^{m}Cₖₛ^{m}Cₖ | | |
| | | | | | C | | | |
| 936163 | N/A | N/A | 12007 | 12022 | CAACAGA | ^{m}CₖₛAₖₛA_{ds}^{m}C_{ds}A_{ds}G_{ds}T_{ds}T_{ds} | 43 | 2047 |
| | | | | | TATACGCT | A_{ds}T_{ds}A_{ds}^{m}CₑₛGₑₛ^{m}CₑₛTₖₛ^{m}Cₖ | | |
| | | | | | C | | | |
| 936164 | 493 | 508 | 13604 | 13619 | CGCGACA | ^{m}CₖₛGₖₛ^{m}C_{ds}G_{ds}A_{ds}^{m}C_{ds}A_{ds}^{m}C_{ds} | 77 | 861 |
| | | | | | CCGTGTCG | ^{m}C_{ds}G_{ds}T_{ds}GₑₛTₑₛ^{m}CₑₛGₖₛGₖ | | |
| | | | | | G | | | |
| 936165 | 499 | 514 | 13610 | 13625 | CCTGTCCG | ^{m}Cₖₛ^{m}CₖₛT_{ds}G_{ds}T_{ds}^{m}C_{ds}^{m}C_{ds}G_{ds} | 43 | 1165 |
| | | | | | CGACACC | ^{m}C_{ds}G_{ds}A_{ds}^{m}CₑₛAₑₛ^{m}Cₑₛ^{m}CₖₛGₖ | | |
| | | | | | G | | | |
| 936166 | 811 | 826 | 13922 | 13937 | AGCACTTC | AₖₛGₖₛ^{m}C_{ds}A_{ds}^{m}C_{ds}T_{ds}T_{ds}^{m}C_{ds} | 46 | 640 |
| | | | | | GCCCACC | G_{ds}^{m}C_{ds}^{m}C_{ds}^{m}CₑₛAₑₛ^{m}Cₑₛ^{m}Cₖₛ | | |
| | | | | | A | Aₖ | | |
| 936167 | 830 | 845 | 13941 | 13956 | GGCCGTCT | GₖₛGₖₛ^{m}C_{ds}^{m}C_{ds}G_{ds}T_{ds}^{m}C_{ds}T_{ds} | 75 | 114 |
| | | | | | CGATGTCC | ^{m}C_{ds}G_{ds}A_{ds}TₑₛGₑₛTₑₛ^{m}Cₖₛ^{m}Cₖ | | |
| 936169 | N/A | N/A | 14216 | 14231 | TGAATTCA | TₖₛGₖₛA_{ds}A_{ds}T_{ds}T_{ds}^{m}C_{ds}A_{ds}T_{ds} | 37 | 2280 |
| | | | | | TATCATCC | A_{ds}T_{ds}^{m}CₑₛAₑₛTₑₛ^{m}Cₖₛ^{m}Cₖ | | |
| 936170 | N/A | N/A | 15388 | 15403 | CTGCTTTT | ^{m}CₖₛTₖₛG_{ds}^{m}C_{ds}T_{ds}T_{ds}T_{ds}T_{ds}^{m} | 56 | 2264 |
| | | | | | CGGCCCA | C_{ds}G_{ds}G_{ds}^{m}Cₑₛ^{m}Cₑₛ^{m}CₑₛAₖₛGₖ | | |
| | | | | | G | | | |
| 936171 | N/A | N/A | 16599 | 16614 | ATGAACTT | AₖₛTₖₛG_{ds}A_{ds}A_{ds}^{m}C_{ds}T_{ds}T_{ds}G_{ds} | 86 | 2281 |
| | | | | | GGTTCAG | G_{ds}T_{ds}Tₑₛ^{m}CₑₛAₑₛGₖₛGₖ | | |
| | | | | | G | | | |
| 936172 | N/A | N/A | 17293 | 17308 | CCACGGTT | ^{m}Cₖₛ^{m}CₖₛA_{ds}^{m}C_{ds}G_{ds}G_{ds}T_{ds}T_{ds} | 47 | 2132 |
| | | | | | GTCCCCA | G_{ds}T_{ds}^{m}C_{ds}^{m}Cₑₛ^{m}Cₑₛ^{m}CₑₛmAₖₛGₖ | | |
| | | | | | G | | | |
| 936173 | N/A | N/A | 17306 | 17321 | GACTTCCT | GₖₛAₖₛ^{m}C_{ds}T_{ds}Ts^{m}C_{ds}^{m}C_{ds}T_{ds} | 64 | 1982 |
| | | | | | AGTATCC | A_{ds}G_{ds}T_{ds}AₑₛTₑₛ^{m}Cₑₛ^{m}CₖₛAₖ | | |
| | | | | | A | | | |
| 936174 | N/A | N/A | 17494 | 17509 | AAACTTGT | AₖₛAₖₛA_{ds}^{m}C_{ds}T_{ds}T_{ds}G_{ds}T_{ds}A_{ds} | 30 | 2282 |
| | | | | | AACAGTG | A_{ds}^{m}C_{ds}AₑₛGₑₛTₑₛGₖₛGₖ | | |
| | | | | | G | | | |
| 936175 | N/A | N/A | 17526 | 17541 | ATTCATAG | AₖₛTₖₛT_{ds}^{m}C_{ds}A_{ds}T_{ds}A_{ds}G_{ds}A_{ds} | 45 | 2283 |
| | | | | | ACTTTCCC | ^{m}C_{ds}T_{ds}TₑₛTₑₛ^{m}Cₑₛ^{m}Cₖₛ^{m}Cₖ | | |
| 936176 | 1748 | 1763 | 20033 | 20048 | TTGTCGAG | TₖₛTₖₛG_{ds}T_{ds}^{m}C_{ds}G_{ds}A_{ds}G_{ds}T_{ds} | 47 | 803 |
| | | | | | TCACTGCC | ^{m}C_{ds}A_{ds}^{m}CₑₛTₑₛGₑₛ^{m}Cₖₛ^{m}Cₖ | | |
| 936177 | 1895 | 1910 | 20180 | 20195 | TTCTCTAG | TₖₛTₖₛ^{m}C_{ds}T_{ds}^{m}C_{ds}T_{ds}A_{ds}G_{ds}T_{ds} | 64 | 2284 |
| | | | | | TATCTTTA | A_{ds}T_{ds}^{m}CₑₛTₑₛTₑₛTₖₛAₖ | | |
| 936178 | N/A | N/A | 3531 | 3546 | CAATAAG | ^{m}CₖₛAₖₛA_{ds}T_{ds}A_{ds}A_{ds}G_{ds}^{m}C_{ds} | 41 | 1129 |
| | | | | | CAAGTCT | A_{ds}A_{ds}G_{ds}Tₑₛ^{m}CₖₛTₑₛGₖₛGₑ | | |
| | | | | | GG | | | |
| 936179 | N/A | N/A | 3685 | 3700 | GGTTTTTG | GₖₛGₖₛT_{ds}T_{ds}T_{ds}T_{ds}T_{ds}G_{ds}^{m}C_{ds} | 31 | 1852 |
| | | | | | CACTTCCT | A_{ds}^{m}C_{ds}TₑₛTₖₛ^{m}Cₑₛ^{m}CₖₛTₑ | | |
| 936180 | N/A | N/A | 3795 | 3810 | GGGTTAT | GₖₛGₖₛG_{ds}T_{ds}T_{ds}A_{ds}T_{ds}A_{ds}^{m}C_{ds} | 30 | 1358 |
| | | | | | ACTCAGG | T_{ds}^{m}C_{ds}AₑₛGₖₛGₑₛ^{m}CₖₛTₑ | | |
| | | | | | CT | | | |
| 936181 | N/A | N/A | 4903 | 4918 | GCCGTCAT | Gₖₛ^{m}Cₖₛ^{m}C_{ds}G_{ds}T_{ds}^{m}C_{ds}A_{ds}T_{ds} | 46 | 1353 |
| | | | | | AATCCTG | A_{ds}A_{ds}T_{ds}^{m}Cₑₛ^{m}CₖₛTₑₛGₖₛGₑ | | |
| | | | | | G | | | |
| 936182 | N/A | N/A | 4906 | 4921 | TGCGCCGT | TₖₛGₖₛ^{m}C_{ds}G_{ds}^{m}C_{ds}^{m}C_{ds}G_{ds}T_{ds} | 81 | 1581 |
| | | | | | CATAATCC | ^{m}C_{ds}A_{ds}T_{ds}AₑₛAₖₛTₑₛ^{m}Cₖₛ^{m}Cₑ | | |
| 936183 | N/A | N/A | 4908 | 4923 | GGTGCGC | GₖₛGₖₛT_{ds}G_{ds}^{m}C_{ds}G_{ds}^{m}C_{ds}^{m}C_{ds} | 50 | 1658 |
| | | | | | CGTCATAG | _{ds}T_{ds}^{m}C_{ds}AₑₛTₖₛAₑₛAₖₛTₑ | | |
| | | | | | AT | | | |
| 936184 | N/A | N/A | 4910 | 4925 | GTGGTGC | GₖₛTₖₛG_{ds}G_{ds}T_{ds}G_{ds}^{m}C_{ds}G_{ds}^{m} | 39 | 593 |
| | | | | | GCCGTCAT | C_{ds}^{m}C_{ds}G_{ds}Tₑₛ^{m}CₖₛAₑₛTₖₛAₑ | | |
| | | | | | A | | | |
| 936185 | N/A | N/A | 5053 | 5068 | CAACTTGC | ^{m}CₖₛAₖₛA_{ds}^{m}C_{ds}T_{ds}T_{ds}G_{ds}^{m}C_{ds} | 49 | 1109 |
| | | | | | TACCCCA | T_{ds}A_{ds}^{m}C_{ds}^{m}Cₑₛ^{m}Cₖₛ^{m}CₑₛAₖₛGₑ | | |
| | | | | | G | | | |
| 936186 | N/A | N/A | 5772 | 5787 | CCCCGCAT | ^{m}Cₖₛ^{m}Cₖₛ^{m}C_{ds}^{m}C_{ds}G_{ds}^{m}C_{ds}A_{ds} | | |
| | | | | | ACGCCGT | T_{ds}A_{ds}^{m}C_{ds}G_{ds}^{m}Cₑₛ^{m}CₖₛGₑₛTₖₛ | 42 | 1707 |
| | | | | | A | Aₑ | | |
| 936218 | N/A | N/A | 3530 | 3545 | AATAAGC | AₖₛAₖₛT_{ds}A_{ds}A_{ds}G_{ds}^{m}C_{ds}A_{ds}A_{ds} | 37 | 2242 |
| | | | | | AAGTCTG | G_{ds}T_{ds}^{m}CₑₛTₖₛGₑₛGₖₛTₑ | | |
| | | | | | GT | | | |
| 936219 | N/A | N/A | 3684 | 3699 | GTTTTTGC | GₖₛTₖₛT_{ds}T_{ds}T_{ds}T_{ds}G_{ds}^{m}C_{ds}A_{ds} | 54 | 1777 |
| | | | | | ACTTCCTG | ^{m}C_{ds}T_{ds}Tₑₛ^{m}Cₖₛ^{m}CₑₛTₖₛGₑ | | |
| 936220 | N/A | N/A | 3794 | 3809 | GGTTATAC | GₖₛGₖₛT_{ds}T_{ds}A_{ds}T_{ds}A_{ds}^{m}C_{ds}T_{ds} | 50 | 2182 |
| | | | | | TCAGGCT | ^{m}C_{ds}A_{ds}GₑₛGₖₛ^{m}CₑₛTₖₛGₑ | | |
| | | | | | G | | | |
| 936221 | N/A | N/A | 4902 | 4917 | CCGTCATA | ^{m}Cₖₛ^{m}CₖₛG_{ds}T_{ds}^{m}C_{ds}A_{ds}T_{ds}A_{ds} | 39 | 1277 |
| | | | | | ATCCTGG | A_{ds}T_{ds}^{m}C_{ds}^{m}CₑₛTₖₛGₑₛGₖₛGₑ | | |
| | | | | | G | | | |
| 936222 | N/A | N/A | 4905 | 4920 | GCGCCGT | Gₖₛ^{m}CₖₛG_{ds}^{m}C_{ds}^{m}C_{ds}G_{ds}T_{ds}^{m}C_{ds} | 45 | 1505 |
| | | | | | CATAATCC | A_{ds}T_{ds}A_{ds}AₑₛTₖₛ^{m}Cₑₛ^{m}CₖₛTₑ | | |
| | | | | | T | | | |
| 936223 | N/A | N/A | 4907 | 4922 | GTGCGCC | GₖₛTₖₛG_{ds}^{m}C_{ds}G_{ds}^{m}C_{ds}^{m}C_{ds}G_{ds} | 60 | 2243 |
| | | | | | GTCATAAT | T_{ds}^{m}C_{ds}A_{ds}TₑₛAₖₛAₑₛTₖₛ^{m}Cₑ | | |
| | | | | | C | | | |
| 936224 | N/A | N/A | 4909 | 4924 | TGGTGCG | TₖₛGₖₛG_{ds}T_{ds}G_{ds}^{m}C_{ds}G_{ds}^{m}C_{ds}^{m} | 42 | 517 |
| | | | | | CCGTCATA | C_{ds}G_{ds}T_{ds}^{m}CₑₛAₖₛTₑₛAₖₛAₑ | | |
| | | | | | A | | | |
| 936225 | N/A | N/A | 5052 | 5067 | AACTTGCT | AₖₛAₖₛ^{m}C_{ds}T_{ds}T_{ds}G_{ds}^{m}C_{ds}T_{ds}A_{ds} | 55 | 1033 |
| | | | | | ACCCCAG | ^{m}C_{ds}^{m}C_{ds}^{m}Cₑₛ^{m}CₖₛAₑₛGₖₛGₑ | | |
| | | | | | G | | | |
| 936226 | N/A | N/A | 5771 | 5786 | CCCGCAT | ^{m}Cₖₛ^{m}Cₖₛ^{m}C_{ds}G_{ds}^{m}C_{ds}A_{ds}T_{ds}A_{ds} | 63 | 1513 |
| | | | | | ACGCCGT | ^{m}C_{ds}G_{ds}^{m}C_{ds}^{m}CₑₛGₖₛTₑₛAₖₛm | | |
| | | | | | AC | Cₑ | | |
| 936227 | N/A | N/A | 5773 | 5788 | GCCCCGC | Gₖₛ^{m}Cₖₛ^{m}C_{ds}^{m}C_{ds}^{m}C_{ds}G_{ds}^{m}C_{ds} | 60 | 450 |
| | | | | | ATACGCC | A_{ds}T_{ds}A_{ds}^{m}C_{ds}Gₑₛ^{m}Cₖₛ^{m}CₑₛGₖₛ | | |
| | | | | | GT | Tₑ | | |
| 936229 | N/A | N/A | 6360 | 6375 | GCAAAGG | Gₖₛ^{m}CₖₛA_{ds}A_{ds}A_{ds}G_{ds}G_{ds}^{m}C_{ds} | 41 | 2244 |
| | | | | | CATACTCC | A_{ds}T_{ds}A_{ds}^{m}CₑₛTₖₛ^{m}Cns^{m}CₖₛAₑ | | |
| | | | | | A | | | |
| 936256 | N/A | N/A | 3532 | 3547 | GCAATAA | Gₖₛ^{m}CₖₛA_{ds}A_{ds}T_{ds}A_{ds}A_{ds}G_{ds}^{m} | 29 | 2247 |
| | | | | | GCAAGTC | C_{ds}A_{ds}A_{ds}GₑₛTₖₛ^{m}CₑₛTₖₛGₑ | | |
| | | | | | TG | | | |
| 936257 | N/A | N/A | 3686 | 3701 | CGGTTTTT | ^{m}CₖₛGₖₛG_{ds}T_{ds}T_{ds}T_{ds}T_{ds}T_{ds}G_{ds} | 36 | 1928 |
| | | | | | GCACTTCC | ^{m}C_{ds}A_{ds}^{m}CₑₛTₖₛTₑₛ^{m}Cₖₛ^{m}Cₑ | | |
| 936258 | N/A | N/A | 3796 | 3811 | CGGGTTAT | ^{m}CₖₛGₖₛG_{ds}G_{ds}T_{ds}T_{ds}A_{ds}T_{ds}A_{ds} | 25 | 2183 |
| | | | | | ACTCAGG | ^{m}C_{ds}T_{ds}^{m}CnsAₖₛGₑₛGₖₛ^{m}Cₑ | | |
| | | | | | C | | | |
| 936259 | N/A | N/A | 4904 | 4919 | CGCCGTC | ^{m}CₖₛGₖₛ^{m}C_{ds}^{m}C_{ds}G_{ds}T_{ds}^{m}C_{ds}A_{ds} | 46 | 1429 |
| | | | | | ATAATCCT | T_{ds}A_{ds}A_{ds}Tₑₛ^{m}Cₖₛ^{m}CₑₛTₖₛGₑ | | |
| | | | | | G | | | |
| 936260 | N/A | N/A | 4911 | 4926 | GGTGGTG | GₖₛGₖₛT_{ds}G_{ds}G_{ds}T_{ds}G_{ds}^{m}C_{ds}G_{ds} | 45 | 669 |
| | | | | | CGCCGTC | ^{m}C_{ds}^{m}C_{ds}GₑₛTₖₛ^{m}CnsAₖₛTₑ | | |
| | | | | | AT | | | |
| 936261 | N/A | N/A | 5054 | 5069 | GCAACTT | Gₖₛ^{m}CₖₛA_{ds}A_{ds}^{m}C_{ds}T_{ds}T_{ds}G_{ds}^{m} | 46 | 1186 |
| | | | | | GCTACCCC | C_{ds}T_{ds}A_{ds}^{m}Cₑₛ^{m}Cₖₛ^{m}Cₑₛ^{m}CₖₛAₑ | | |
| | | | | | A | | | |

TABLE 33
Reduction of SPDEF RNA by 4 μM modified oligonucleotides

| | SEQ | SEQ | SEQ | SEQ | | | | |
|---|---|---|---|---|---|---|---|---|
| | ID | ID | ID | ID | | | | |
| | NO: 1 | NO: 1 | NO: 2 | NO: 2 | | | | SEQ |
| Compound | Start | Stop | Start | Stop | Sequence | Chemistry Notation | (% | ID |
| Number | Site | Site | Site | Site | (5′ to 3′) | (5′ to 3′) | UTC) | NO |
| 833814 | N/A | N/A | 12009 | 12024 | ACCAACA | Aₖₛ^{m}Cₖₛ^{m}CₖₛA_{ds}A_{ds}^{m}C_{ds}A_{ds}G_{ds} | 51 | 993 |
| | | | | | GATATAC | A_{ds}T_{ds}A_{ds}T_{ds}A_{ds}^{m}CₖₛGₖₛ^{m}C^{k} | | |
| | | | | | GC | | | |
| 854302 | N/A | N/A | 8811 | 8826 | TGGATTA | TₖₛGₖₛGₖₛA_{ds}T_{ds}T_{ds}A_{ds}A_{ds}G_{ds} | 27 | 1715 |
| | | | | | AGGCTCA | G_{ds}^{m}C_{ds}T_{ds}^{m}C_{ds}AₖₛGₖₛ^{m}C^{k} | | |
| | | | | | GC | | | |
| 936189 | N/A | N/A | 6361 | 6376 | AGCAAAG | AₖₛGₖₛ^{m}C_{ds}A_{ds}A_{ds}A_{ds}G_{ds}G_{ds}^{m} | 51 | 678 |
| | | | | | GCATACT | C_{ds}A_{ds}T_{ds}Aₑₛ^{m}CₖₛTₑₛ^{m}Cₖₛ^{m}Cₑ | | |
| | | | | | CC | | | |
| 936190 | N/A | N/A | 7439 | 7454 | CAGCATG | ^{m}CₖₛAₖₛG_{ds}^{m}C_{ds}A_{ds}T_{ds}G_{ds}A_{ds} | 65 | 1517 |
| | | | | | AGTAGAC | G_{ds}T_{ds}A_{ds}GₑₛAₖₛ^{m}CₑₛGₖₛAₑ | | |
| | | | | | GA | | | |
| 936191 | N/A | N/A | 8810 | 8825 | GGATTAA | GₖₛGₖₛA_{ds}T_{ds}T_{ds}A_{ds}A_{ds}G_{ds}G_{ds} | 28 | 683 |
| | | | | | GGCTCAG | ^{m}C_{ds}T_{ds}^{m}CₑₛAₖₛGₑₛ^{m}CₖₛGₑ | | |
| | | | | | CG | | | |
| 936192 | N/A | N/A | 8811 | 8826 | TGGATTA | TₖₛGₖₛG_{ds}A_{ds}T_{ds}T_{ds}A_{ds}A_{ds}G_{ds} | 33 | 1715 |
| | | | | | AGGCTCA | G_{ds}^{m}C_{ds}Tₑₛ^{m}CₖₛAₑₛGₖₛ^{m}Cₑ | | |
| | | | | | GC | | | |
| 936193 | N/A | N/A | 9377 | 9392 | GCTTATT | Gₖₛ^{m}CₖₛT_{ds}T_{ds}A_{ds}T_{ds}T_{ds}A_{ds}G_{ds} | 47 | 1444 |
| | | | | | AGCAGCA | ^{m}C_{ds}A_{ds}Gₑₛ^{m}CₖₛAₑₛGₖₛGₑ | | |
| | | | | | GG | | | |
| 936194 | N/A | N/A | 9801 | 9816 | GCTTTAT | Gₖₛ^{m}CₖₛT_{ds}T_{ds}T_{ds}AₖₛT_{ds}A_{ds}G_{ds} | 39 | 761 |
| | | | | | AGATGCG | A_{ds}T_{ds}Gₑₛ^{m}CₖₛGₑₛGₖₛAₑ | | |
| | | | | | GA | | | |
| 936195 | N/A | N/A | 10157 | 10172 | CCCCACC | ^{m}Cₖₛ^{m}Cₖₛ^{m}C_{ds}^{m}C_{ds}A_{ds}^{m}C_{ds}^{m}C_{ds} | 63 | 383 |
| | | | | | AAGCCTC | A_{ds}A_{ds}G_{ds}^{m}C_{ds}^{m}CₑₛTₖₛ^{m}CₑₛGₖₛ | | |
| | | | | | GG | Gₑ | | |
| 936196 | N/A | N/A | 10172 | 10187 | GCCAAGG | Gₖₛ^{m}Cₖₛ^{m}C_{ds}A_{ds}A_{ds}G_{ds}G_{ds}A_{ds} | 64 | 610 |
| | | | | | AATCTAC | A_{ds}T_{ds}^{m}C_{ds}TₑₛAₖₛ^{m}CₑₛTₖₛ^{m}Cₑ | | |
| | | | | | TC | | | |
| 936197 | N/A | N/A | 10272 | 10287 | AGAGAG | AₖₛGₖₛA_{ds}G_{ds}A_{ds}G_{ds}G_{ds}T_{ds}A_{ds} | 51 | 990 |
| | | | | | GTAAATC | A_{ds}A_{ds}Tₑₛ^{m}Cₖₛ^{m}Cₑₛ^{m}Cₖₛ^{m}Cₑ | | |
| | | | | | CCC | | | |
| 936198 | N/A | N/A | 11641 | 11656 | GACATTT | GₖₛAₖₛ^{m}C_{ds}A_{ds}T_{ds}T_{ds}T_{ds}A_{ds}T_{ds} | 38 | 1893 |
| | | | | | ATGGTGC | G_{ds}G_{ds}TₑₛGₖₛ^{m}Cₑₛ^{m}Cₖₛ^{m}Cₑ | | |
| | | | | | CC | | | |
| 936199 | N/A | N/A | 12004 | 12019 | CAGATAT | ^{m}CₖₛAₖₛG_{ds}A_{ds}T_{ds}A_{ds}T_{ds}A_{ds}^{m} | 35 | 1895 |
| | | | | | ACGCTCC | C_{ds}G_{ds}^{m}C_{ds}Tₑₛ^{m}Cₖₛ^{m}CₑₛTₖₛAₑ | | |
| | | | | | TA | | | |
| 936200 | N/A | N/A | 12006 | 12021 | AACAGAT | AₖₛAₖₛ^{m}C_{ds}A_{ds}G_{ds}A_{ds}T_{ds}A_{ds}T_{ds} | 47 | 1971 |
| | | | | | ATACGCT | A_{ds}^{m}C_{ds}Gₑₛ^{m}CₖₛTₑₛ^{m}Cₖₛ^{m}Cₑ | | |
| | | | | | CC | | | |
| 936201 | 492 | 507 | 13603 | 13618 | GCGACAC | Gₖₛ^{m}CₖₛG_{ds}A_{ds}^{m}C_{ds}A_{ds}^{m}C_{ds}^{m} | 68 | 255 |
| | | | | | CGTGTCG | C_{ds}G_{ds}T_{ds}G_{ds}Tₑₛ^{m}CₖₛGₑₛGₖₛGₑ | | |
| | | | | | GG | | | |
| 936202 | 498 | 513 | 13609 | 13624 | CTGTCCG | ^{m}CₖₛTₖₛG_{ds}T_{ds}^{m}C_{ds}^{m}C_{ds}G_{ds}^{m}C_{ds} | 57 | 1089 |
| | | | | | CGACACC | G_{ds}A_{ds}^{m}C_{ds}Aₑₛ^{m}Cₖₛ^{m}CₑₛGₖₛTₑ | | |
| | | | | | GT | | | |
| 936203 | 810 | 825 | 13921 | 13936 | GCACTTC | Gₖₛ^{m}CₖₛA_{ds}^{m}C_{ds}T_{ds}T_{ds}^{m}C_{ds}G_{ds} | 67 | 563 |
| | | | | | GCCCACC | ^{m}C_{ds}^{m}C_{ds}^{m}C_{ds}Aₑₛ^{m}Cₖₛ^{m}CₑₛAₖₛ | | |
| | | | | | AC | ^{m}Cₑ | | |
| 936204 | 829 | 844 | 13940 | 13955 | GCCGTCT | Gₖₛ^{m}Cₖₛ^{m}C_{ds}G_{ds}T_{ds}^{m}C_{ds}T_{ds}^{m}C_{ds} | 67 | 1552 |
| | | | | | CGATGTC | G_{ds}A_{ds}T_{ds}GₑₛTₖₛ^{m}Cₑₛ^{m}CₖₛTₑ | | |
| | | | | | CT | | | |
| 936206 | N/A | N/A | 14213 | 14228 | ATTCATA | AₖₛTₖₛT_{ds}^{m}C_{ds}A_{ds}T_{ds}A_{ds}T_{ds}^{m}C_{ds} | 40 | 1606 |
| | | | | | TCATCCA | A_{ds}T_{ds}^{m}Cₑₛ^{m}CₖₛAₑₛGₖₛ^{m}Cₑ | | |
| | | | | | GC | | | |
| 936207 | N/A | N/A | 14215 | 14230 | GAATTCA | GₖₛAₖₛA_{ds}T_{ds}T_{ds}^{m}C_{ds}A_{ds}T_{ds}A_{ds} | 40 | 1682 |
| | | | | | TATCATC | T_{ds}^{m}C_{ds}AₑₛTₖₛ^{m}Cₑₛ^{m}CₖₛAₑ | | |
| | | | | | CA | | | |
| 936208 | N/A | N/A | 15387 | 15402 | TGCTTTT | TₖₛGₖₛ^{m}C_{ds}T_{ds}T_{ds}T_{ds}T_{ds}^{m}C_{ds}G_{ds} | 39 | 999 |
| | | | | | CGGCCC | G_{ds}^{m}C_{ds}^{m}Cₑₛ^{m}CₖₛAₑₛGₖₛAₑ | | |
| | | | | | GA | | | |
| 936209 | N/A | N/A | 16598 | 16613 | TGAACTT | TₖₛGₖₛA_{ds}A_{ds}^{m}C_{ds}T_{ds}T_{ds}G_{ds}G_{ds} | 40 | 1686 |
| | | | | | GGTTCAG | T_{ds}T_{ds}^{m}CₑₛAₖₛGₑₛGₖₛGₑ | | |
| | | | | | GG | | | |
| 936210 | N/A | N/A | 17291 | 17306 | ACGGTTG | Aₖₛ^{m}CₖₛG_{ds}G_{ds}T_{ds}T_{ds}G_{ds}T_{ds}^{m} | 39 | 2056 |
| | | | | | TCCCCAG | C_{ds}^{m}C_{ds}^{m}C_{ds}^{m}CₑₛAₖₛGₑₛ^{m}CₖₛTₑ | | |
| | | | | | CT | | | |
| 936211 | N/A | N/A | 17292 | 17307 | CACGGTT | ^{m}CₖₛAₖₛ^{m}C_{ds}G_{ds}G_{ds}T_{ds}T_{ds}G_{ds} | 41 | 163 |
| | | | | | GTCCCCA | T_{ds}^{m}C_{ds}^{m}C_{ds}^{m}Cₑₛ^{m}CₖₛAₑₛGₖₛ^{m} | | |
| | | | | | GC | Cₑ | | |
| 936212 | N/A | N/A | 17303 | 17318 | TTCCTAG | TₖₛTₖₛ^{m}C_{ds}^{m}C_{ds}T_{ds}A_{ds}G_{ds}T_{ds} | 31 | 1754 |
| | | | | | TATCCAC | A_{ds}T_{ds}^{m}C_{ds}^{m}CₑₛAₖₛ^{m}CₑₛGₖₛGₑ | | |
| | | | | | GG | | | |
| 936213 | N/A | N/A | 17305 | 17320 | ACTTCCT | Aₖₛ^{m}CₖₛT_{ds}T_{ds}^{m}C_{ds}^{m}C_{ds}T_{ds}A_{ds} | 45 | 1906 |
| | | | | | AGTATCC | G_{ds}T_{ds}A_{ds}Tₑₛ^{m}Cₖₛ^{m}CₑₛAₖₛ^{m}Cₑ | | |
| | | | | | AC | | | |
| 936214 | N/A | N/A | 17493 | 17508 | AACTTGT | AₖₛAₖₛ^{m}C_{ds}T_{ds}T_{ds}G_{ds}T_{ds}A_{ds}A_{ds} | 21 | 2059 |
| | | | | | AACAGTG | ^{m}C_{ds}A_{ds}GₑₛTₖₛGₑₛGₖₛTₑ | | |
| | | | | | GT | | | |
| 936215 | N/A | N/A | 17525 | 17540 | TTCATAG | TₖₛTₖₛ^{m}C_{ds}A_{ds}T_{ds}A_{ds}G_{ds}A_{ds} | 65 | 240 |
| | | | | | ACTTTCC | C_{ds}T_{ds}T_{ds}Tₑₛ^{m}Cₖₛ^{m}Cₑₛ^{m}CₖₛTₑ | | |
| | | | | | CT | | | |
| 936216 | 1747 | 1762 | 20032 | 20047 | TGTCGAG | TₖₛGₖₛT_{ds}^{m}C_{ds}G_{ds}A_{ds}G_{ds}T_{ds}m | 41 | 727 |
| | | | | | TCACTGC | C_{ds}A_{ds}^{m}C_{ds}TₑₛGₖₛ^{m}Cₑₛ^{m}Cₖₛ^{m}Cₑ | | |
| | | | | | CC | | | |
| 936217 | 1894 | 1909 | 20179 | 20194 | TCTCTAG | Tₖₛ^{m}CₖₛT_{ds}^{m}C_{ds}T_{ds}A_{ds}G_{ds}T_{ds}A_{ds} | 53 | 364 |
| | | | | | TATCTTT | T_{ds}^{m}C_{ds}TₑₛTₖₛTₑₛAₖₛTₑ | | |
| | | | | | AT | | | |
| 936230 | N/A | N/A | 7438 | 7453 | AGCATGA | AₖₛGₖₛ^{m}C_{ds}A_{ds}T_{ds}G_{ds}A_{ds}G_{ds}T_{ds} | 49 | 1866 |
| | | | | | GTAGACG | A_{ds}G_{ds}Aₑₛ^{m}CₖₛGₑₛAₖₛGₑ | | |
| | | | | | AG | | | |
| 936231 | N/A | N/A | 8809 | 8824 | GATTAAG | GₖₛAₖₛT_{ds}T_{ds}A_{ds}A_{ds}G_{ds}G_{ds}^{m}C_{ds} | 42 | 2245 |
| | | | | | GCTCAGC | T_{ds}^{m}C_{ds}AₑₛGₖₛ^{m}CₑₛGₖₛTₑ | | |
| | | | | | GT | | | |
| 936232 | N/A | N/A | 9376 | 9391 | CTTATTA | ^{m}CₖₛTₖₛT_{ds}A_{ds}T_{ds}T_{ds}A_{ds}G_{ds}^{m}C_{ds} | 41 | 2221 |
| | | | | | GCAGCAG | A_{ds}G_{ds}^{m}CₑₛAₖₛGₑₛGₖₛGₑ | | |
| | | | | | GG | | | |
| 936233 | N/A | N/A | 9800 | 9815 | CTTTATA | ^{m}CₖₛTₖₛT_{ds}T_{ds}A_{ds}T_{ds}A_{ds}G_{ds}A_{ds} | 49 | 2229 |
| | | | | | GATGCGG | T_{ds}G_{ds}^{m}CₑₛGₖₛGₑₛAₖₛ^{m}Cₑ | | |
| | | | | | AC | | | |
| 936234 | N/A | N/A | 10156 | 10171 | CCCACCA | ^{m}Cₖₛ^{m}Cₖₛ^{m}C_{ds}A_{ds}^{m}C_{ds}^{m}C_{ds}A_{ds} | 49 | 2246 |
| | | | | | AGCCTCG | A_{ds}G_{ds}^{m}C_{ds}^{m}C_{ds}Tₑₛ^{m}CₖₛGₑₛGₖₛ | | |
| | | | | | GT | Tₑ | | |
| 936235 | N/A | N/A | 10171 | 10186 | CCAAGGA | ^{m}Cₖₛ^{m}CₖₛA_{ds}A_{ds}G_{ds}G_{ds}A_{ds}A_{ds} | 67 | 1734 |
| | | | | | ATCTACT | T_{ds}^{m}C_{ds}T_{ds}Aₑₛ^{m}CₖₛTₑₛ^{m}Cₖₛ^{m}Cₑ | | |
| | | | | | CC | | | |
| 936236 | N/A | N/A | 10271 | 10286 | GAGAGGT | GₖₛAₖₛG_{ds}A_{ds}G_{ds}G_{ds}T_{ds}A_{ds}A_{ds} | 47 | 2233 |
| | | | | | AAATCCC | A_{ds}T_{ds}^{m}Cₑₛ^{m}Cₖₛ^{m}Cₑₛ^{m}CₖₛAₑ | | |
| | | | | | CA | | | |
| 936237 | N/A | N/A | 11640 | 11655 | ACATTTA | Aₖₛ^{m}CₖₛA_{ds}T_{ds}T_{ds}T_{ds}A_{ds}T_{ds}G_{ds} | 45 | 992 |
| | | | | | TGGTGCC | G_{ds}T_{ds}Gₑₛ^{m}Cₖₛ^{m}Cₑₛ^{m}CₖₛTₑ | | |
| | | | | | CT | | | |
| 936238 | N/A | N/A | 12003 | 12018 | AGATATA | AₖₛGₖₛA_{ds}T_{ds}A_{ds}T_{ds}A_{ds}^{m}C_{ds}G_{ds} | 48 | 1819 |
| | | | | | CGCTCCT | ^{m}C_{ds}T_{ds}^{m}Cₑₛ^{m}CₖₛTₑₛAₖₛAₑ | | |
| | | | | | AA | | | |
| 936239 | N/A | N/A | 12005 | 12020 | ACAGATA | Aₖₛ^{m}CₖₛA_{ds}G_{ds}A_{ds}T_{ds}A_{ds}T_{ds}A_{ds} | 58 | 917 |
| | | | | | TACGCTC | ^{m}C_{ds}G_{ds}^{m}CₑₛTₖₛ^{m}Cₑₛ^{m}CₖₛTₑ | | |
| | | | | | CT | | | |
| 936240 | 491 | 506 | 13602 | 13617 | CGACACC | ^{m}CₖₛGₖₛA_{ds}^{m}Ck_{ds}A_{ds}^{m}C_{ds}^{m}C_{ds} | 69 | 2274 |
| | | | | | GTGTCGG | G_{ds}T_{ds}G_{ds}T_{ds}^{m}CₑₛGₖₛGₑₛGₖₛGₑ | | |
| | | | | | GG | | | |
| 936241 | 497 | 512 | 13608 | 13623 | TGTCCGC | TₖₛGₖₛT_{ds}^{m}C_{ds}^{m}C_{ds}G_{ds}^{m}C_{ds}G_{ds} | 56 | 1014 |
| | | | | | GACACCG | A_{ds}^{m}C_{ds}A_{ds}^{m}Cₑₛ^{m}CₖₛGₑₛTₖₛGₑ | | |
| | | | | | TG | | | |
| 936242 | 809 | 824 | 13920 | 13935 | CACTTCG | ^{m}CₖₛAₖₛ^{m}C_{ds}T_{ds}T_{ds}^{m}C_{ds}G_{ds}^{m}C_{ds} | 52 | 487 |
| | | | | | CCCACCA | ^{m}C_{ds}^{m}C_{ds}A_{ds}^{m}Cₑₛ^{m}CₖₛAₑₛ^{m}Cₖₛ | | |
| | | | | | CC | ^{m}Cₑ | | |
| 936243 | 828 | 843 | 13939 | 13954 | CCGTCTC | ^{m}Cₖₛ^{m}CₖₛG_{ds}T_{ds}^{m}C_{ds}T_{ds}^{m}C_{ds}G_{ds} | 51 | 37 |
| | | | | | GATGTCC | A_{ds}T_{ds}G_{ds}Tₑₛ^{m}Cₖₛ^{m}CₑₛTₖₛTₑ | | |
| | | | | | TT | | | |
| 936245 | N/A | N/A | 14212 | 14227 | TTCATAT | TₖₛTₖₛ^{m}C_{ds}A_{ds}T_{ds}A_{ds}T_{ds}^{m}C_{ds}A_{ds} | 41 | 2275 |
| | | | | | CATCCAG | T_{ds}^{m}C_{ds}^{m}CₑₛAₖₛGₑₛ^{m}CₖₛAₑ | | |
| | | | | | CA | | | |
| 936246 | N/A | N/A | 14214 | 14229 | AATTCAT | AₖₛAₖₛT_{ds}T_{ds}^{m}C_{ds}A_{ds}T_{ds}A_{ds}T_{ds} | 50 | 2255 |
| | | | | | ATCATCC | ^{m}C_{ds}A_{ds}Tₑₛ^{m}Cₖₛ^{m}CₑₛAₖₛGₑ | | |
| | | | | | AG | | | |
| 936247 | N/A | N/A | 15386 | 15401 | GCTTTTC | Gₖₛ^{m}CₖₛT_{ds}T_{ds}T_{ds}T_{ds}^{m}C_{ds}G_{ds}G_{ds} | 32 | 2263 |
| | | | | | GGCCCAG | ^{m}C_{ds}^{m}C_{ds}^{m}CₑₛAₖₛGₑₛAₖₛGₑ | | |
| | | | | | AG | | | |
| 936248 | N/A | N/A | 16597 | 16612 | GAACTTG | GₖₛAₖₛA_{ds}^{m}C_{ds}T_{ds}T_{ds}G_{ds}G_{ds}T_{ds} | 60 | 2276 |
| | | | | | GTTCAGG | T_{ds}^{m}C_{ds}AₑₛGₖₛGₑₛGₖₛ^{m}Cₑ | | |
| | | | | | GC | | | |
| 936249 | N/A | N/A | 17290 | 17305 | CGGTTGT | ^{m}CₖₛGₖₛG_{ds}T_{ds}T_{ds}G_{ds}T_{ds}^{m}C_{ds}^{m} | 28 | 2277 |
| | | | | | CCCCAGC | C_{ds}^{m}C_{ds}^{m}C_{ds}AₑₛGₖₛ^{m}CₑₛTₖₛ^{m}Cₑ | | |
| | | | | | TC | | | |
| 936250 | N/A | N/A | 17302 | 17317 | TCCTAGT | Tₖₛ^{m}Cₖₛ^{m}C_{ds}T_{dsds}G_{ds}T_{ds}A_{ds}T_{ds} | 43 | 1230 |
| | | | | | ATCCACG | ^{m}C_{ds}^{m}C_{ds}Aₑₛ^{m}CₖₛGₑₛGₖₛTₑ | | |
| | | | | | GT | | | |
| 936251 | N/A | N/A | 17304 | 17319 | CTTCCTA | ^{m}CₖₛTₖₛT_{ds}^{m}C_{ds}^{m}C_{ds}T_{ds}A_{ds}G_{ds} | 35 | 1830 |
| | | | | | GTATCCA | T_{ds}A_{ds}T_{ds}^{m}Cₑₛ^{m}CₖₛAₑₛ^{m}CₖₛGₑ | | |
| | | | | | CG | | | |
| 936252 | N/A | N/A | 17492 | 17507 | ACTTGTA | Aₖₛ^{m}CₖₛT_{ds}T_{ds}G_{ds}T_{ds}A_{ds}A_{ds}^{m} | 38 | 1983 |
| | | | | | ACAGTGG | C_{ds}A_{ds}G_{ds}TₑₛGₖₛGₑₛTₖₛTₑ | | |
| | | | | | TT | | | |
| 936253 | N/A | N/A | 17524 | 17539 | TCATAGA | Tₖₛ^{m}CₖₛA_{ds}T_{ds}A_{ds}G_{ds}A_{ds}^{m}C_{ds} | 50 | 2278 |
| | | | | | CTTTCCC | T_{ds}T_{ds}T_{ds}^{m}Cₑₛ^{m}Cₖₛ^{m}CₑₛTₖₛGₑ | | |
| | | | | | TG | | | |
| 936254 | 1746 | 1761 | 20031 | 20046 | GTCGAGT | GₖₛTₖₛ^{m}C_{ds}G_{ds}A_{ds}G_{ds}T_{ds}^{m}C_{ds} | 55 | 58 |
| | | | | | CACTGCC | A_{ds}^{m}C_{ds}T_{ds}Gₑₛ^{m}Cₖₛ^{m}Cₑₛ^{m}CₖₛTₑ | | |
| | | | | | CT | | | |
| 936255 | 1893 | 1908 | 20178 | 20193 | CTCTAGT | ^{m}CₖₛTₖₛ^{m}C_{ds}T_{ds}A_{ds}G_{ds}T_{ds}A_{ds}T_{ds} | 56 | 2279 |
| | | | | | ATCTTTA | ^{m}C_{ds}T_{ds}TₑₛTₖₛAₑₛTₖₛTₑ | | |
| | | | | | TT | | | |
| 936264 | N/A | N/A | 6362 | 6377 | AAGCAAA | AₖₛAₖₛG_{ds}^{m}C_{ds}A_{ds}A_{ds}A_{ds}G_{ds}G_{ds} | 46 | 2248 |
| | | | | | GGCATAC | ^{m}C_{ds}A_{ds}TₑₛAₖₛ^{m}CₑₛTₖₛ^{m}Cₑ | | |
| | | | | | TC | | | |
| 936265 | N/A | N/A | 7440 | 7455 | TCAGCAT | Tₖₛ^{m}CₖₛA_{ds}G_{ds}^{m}C_{ds}A_{ds}T_{ds}G_{ds} | 55 | 1942 |
| | | | | | GAGTAGA | A_{ds}G_{ds}T_{ds}AₑₛGₖₛAₑₛ^{m}CₖₛGₑ | | |
| | | | | | CG | | | |
| 936266 | N/A | N/A | 8812 | 8827 | CTGGATT | ^{m}CₖₛTₖₛG_{ds}G_{ds}A_{ds}T_{ds}T_{ds}A_{ds}A_{ds} | 56 | 759 |
| | | | | | AAGGCTC | G_{ds}G_{ds}^{m}CₑₛTₖₛ^{m}CₑₛAₖₛGₑ | | |
| | | | | | AG | | | |
| 936267 | N/A | N/A | 9378 | 9393 | TGCTTAT | TₖₛGₖₛ^{m}C_{ds}T_{ds}T_{ds}A_{ds}T_{ds}T_{ds}A_{ds} | 73 | 2222 |
| | | | | | TAGCAGC | G_{ds}^{m}C_{ds}AₑₛGₖₛ^{m}CₑₛAₖₛGₑ | | |
| | | | | | AG | | | |
| 936268 | N/A | N/A | 9802 | 9817 | TGCTTTA | TₖₛGₖₛ^{m}C_{ds}T_{ds}T_{ds}T_{ds}A_{ds}T_{ds}A_{ds} | 38 | 2230 |
| | | | | | TAGATGC | G_{ds}A_{ds}TₑₛGₖₛ^{m}CₑₛGₖₛGₑ | | |
| | | | | | GG | | | |
| 936269 | N/A | N/A | 10158 | 10173 | TCCCCAC | Tₖₛ^{m}Cₖₛ^{m}C_{ds}^{m}C_{ds}^{m}C_{ds}A_{ds}^{m}C_{ds} | 69 | 2249 |
| | | | | | CAAGCCT | ^{m}C_{ds}A_{ds}A_{ds}G_{ds}^{m}Cₑₛ^{m}CₖₛTₑₛ^{m}Cₖₛ | | |
| | | | | | CG | Gₑ | | |
| 936270 | N/A | N/A | 10173 | 10188 | TGCCAAG | TₖₛGₖₛ^{m}C_{ds}^{m}C_{ds}A_{ds}A_{ds}G_{ds}G_{ds} | 63 | 1810 |
| | | | | | GAATCTA | A_{ds}A_{ds}T_{ds}^{m}CₑₛTₖₛAₑₛ^{m}CₖₛTₑ | | |
| | | | | | CT | | | |
| 936271 | N/A | N/A | 10273 | 10288 | CAGAGAG | ^{m}CₖₛAₖₛG_{ds}A_{ds}G_{ds}G_{ds}A_{ds}G_{ds}G_{ds} | 69 | 2234 |
| | | | | | GTAAATC | T_{ds}A_{ds}A_{ds}AₑₛTₖₛ^{m}Cₑₛ^{m}Cₖₛ^{m}Cₑ | | |
| | | | | | CC | | | |
| 936272 | N/A | N/A | 11642 | 11657 | TGACATT | TₖₛGₖₛA_{ds}^{m}C_{ds}A_{ds}T_{ds}T_{ds}T_{ds}A_{ds} | 66 | 1068 |
| | | | | | TATGGTG | T_{ds}G_{ds}GₑₛTₖₛGₑₛ^{m}Cₖₛ^{m}Cₑ | | |
| | | | | | CC | | | |
| 936273 | N/A | N/A | 12007 | 12022 | CAACAGA | ^{m}CₖₛAₖₛA_{ds}^{m}C_{ds}A_{ds}G_{ds}A_{ds}T_{ds} | 34 | 2047 |
| | | | | | TATACGC | A_{ds}T_{ds}A_{ds}^{m}CₑₛGₖₛ^{m}CₑₛTₖₛ^{m}Cₑ | | |
| | | | | | TC | | | |
| 936274 | 493 | 508 | 13604 | 13619 | CGCGACA | ^{m}CₖₛGₖₛ^{m}C_{ds}G_{ds}A_{ds}^{m}C_{ds}A_{ds}^{m} | 64 | 861 |
| | | | | | CCGTGTC | C_{ds}^{m}C_{ds}G_{ds}T_{ds}GₑₛTₖₛ^{m}CₑₛGₖₛ | | |
| | | | | | GG | Gₑ | | |
| 936275 | 499 | 514 | 13610 | 13625 | CCTGTCC | ^{m}Cₖₛ^{m}CₖₛT_{ds}G_{ds}T_{ds}^{m}C_{ds}^{m}C_{ds}G_{ds} | 48 | 1165 |
| | | | | | GCGACAC | ^{m}C_{ds}G_{ds}A_{ds}^{m}CₑₛAₖₛ^{m}Cₑₛ^{m}Cₖₛ | | |
| | | | | | CG | Gₑ | | |
| 936276 | 811 | 826 | 13922 | 13937 | AGCACTT | AₖₛGₖₛ^{m}C_{ds}A_{ds}^{m}C_{ds}T_{ds}T_{ds}^{m}C_{ds} | 57 | 640 |
| | | | | | CGCCCAC | G_{ds}^{m}C_{ds}^{m}C_{ds}^{m}CₑₛAₖₛ^{m}Cₑₛ^{m}Cₖₛ | | |
| | | | | | CA | Aₑ | | |
| 936277 | 830 | 845 | 13941 | 13956 | GGCCGTC | GₖₛGₖₛ^{m}C_{ds}^{m}C_{ds}G_{ds}T_{ds}^{m}C_{ds}T_{ds} | 66 | 114 |
| | | | | | TCGATGT | ^{m}C_{ds}G_{ds}A_{ds}TₑₛGₖₛTₑₛ^{m}Cₖₛ^{m}Cₑ | | |
| | | | | | CC | | | |
| 936279 | N/A | N/A | 14216 | 14231 | TGAATTC | TₖₛGₖₛA_{ds}A_{ds}T_{ds}T_{ds}^{m}C_{ds}A_{ds}T_{ds} | 34 | 2280 |
| | | | | | ATATCAT | A_{ds}T_{ds}^{m}CₑₛAₖₛTₑₛ^{m}Cₖₛ^{m}Cₑ | | |
| | | | | | CC | | | |
| 936280 | N/A | N/A | 15388 | 15403 | CTGCTTT | ^{m}CₖₛTₖₛG_{ds}^{m}C_{ds}T_{ds}T_{ds}T_{ds}T_{ds}^{m} | 50 | 2264 |
| | | | | | TCGGCCC | C_{ds}G_{ds}G_{ds}^{m}Cₑₛ^{m}Cₖₛ^{m}CₑₛAₖₛGₑ | | |
| | | | | | AG | | | |
| 936281 | N/A | N/A | 16599 | 16614 | ATGAACT | AₖₛTₖₛG_{ds}A_{ds}A_{ds}^{m}C_{ds}T_{ds}T_{ds}G_{ds} | 85 | 2281 |
| | | | | | TGGTTCA | G_{ds}T_{ds}Tₑₛ^{m}CₖₛAₑₛGₖₛGₑ | | |
| | | | | | GG | | | |
| 936282 | N/A | N/A | 17293 | 17308 | CCACGGT | ^{m}Cₖₛ^{m}CₖₛA_{ds}^{m}C_{ds}G_{ds}G_{ds}T_{ds}T_{ds} | 73 | 2132 |
| | | | | | TGTCCCC | G_{ds}T_{ds}^{m}C_{ds}^{m}Cₑₛ^{m}Cₖₛ^{m}CₑₛAₖₛGₑ | | |
| | | | | | AG | | | |
| 936283 | N/A | N/A | 17306 | 17321 | GACTTCC | GₖₛAₖₛ^{m}C_{ds}T_{ds}T_{ds}^{m}C_{ds}^{m}C_{ds}T_{ds} | 59 | 1892 |
| | | | | | TAGTATC | A_{ds}G_{ds}T_{ds}AₑₛTₖₛ^{m}Cₑₛ^{m}CₖₛAₑ | | |
| | | | | | CA | | | |
| 936284 | N/A | N/A | 17494 | 17509 | AAACTTG | AₖₛAₖₛA_{ds}^{m}C_{ds}T_{ds}T_{ds}G_{ds}T_{ds}A_{ds} | 33 | 2282 |
| | | | | | TAACAGT | A_{ds}^{m}C_{ds}AₑₛGₖₛTₑₛGₖₛGₑ | | |
| | | | | | GG | | | |
| 936285 | N/A | N/A | 17526 | 17541 | ATTCATA | AₖₛTₖₛT_{ds}^{m}C_{ds}A_{ds}T_{ds}A_{ds}G_{ds}A_{ds} | 45 | 2283 |
| | | | | | GACTTTC | ^{m}C_{ds}T_{ds}TₑₛTₖₛ^{m}Cₑₛ^{m}Cₖₛ^{m}Cₑ | | |
| | | | | | CC | | | |
| 936286 | 1748 | 1763 | 20033 | 20048 | TTGTCGA | TₖₛTₖₛG_{ds}T_{ds}^{m}C_{ds}G_{ds}A_{ds}G_{ds}T_{ds} | 38 | 803 |
| | | | | | GTCACTG | ^{m}C_{ds}A_{ds}^{m}CₑₛTₖₛGₑₛ^{m}Cₖₛ^{m}Cₑ | | |
| | | | | | CC | | | |
| 936287 | 1895 | 1910 | 20180 | 20195 | TTCTCTA | TₖₛTₖₛ^{m}C_{ds}T_{ds}^{m}C_{ds}T_{ds}A_{ds}G_{ds} | 43 | 2284 |
| | | | | | GTATCTT | T_{ds}A_{ds}T_{ds}^{m}CₑₛTₖₛTₑₛTₖₛAₑ | | |
| | | | | | TA | | | |

### Example 3: Effect of Modified Oligonucleotides on Human SPDEF RNA In Vitro, Multiple Doses

[0650] Modified oligonucleotides selected from the examples above were tested at various doses in VCaP cells. Cultured VCaP cells at a density of 20,000 cells per well were treated with modified oligonucleotide at various doses by electroporation, as specified in the tables below. After a treatment period of approximately 24 hours, total RNA was isolated from the cells and SPDEF RNA levels were measured by quantitative real-time RTPCR. Human SPDEF primer probe set RTS35007 was used to measure RNA levels as described above. SPDEF RNA levels were normalized to total RNA content, as measured by RIBOGREEN®. Results are presented in the tables below as percent reduction of the amount of SPDEF RNA, relative to untreated control (UTC). The half maximal inhibitory concentration (IC₅₀) of each modified oligonucleotide is also presented. IC₅₀ was calculated using a linear regression on a log/linear plot of the data in Excel.

TABLE 34
Dose-dependent percent reduction of human
SPDEF RNA by modified oligonucleotides

| Compound | SPDEF (% UTC) | | | | |
|---|---|---|---|---|---|
| Number | 444 nM | 1333 nM | 4000 nM | 12000 nM | IC₅₀ μM |
| 652522 | 98 | 79 | 54 | 31 | 4.9 |
| 801690 | 86 | 109 | 83 | 53 | >12 |
| 801727 | 86 | 74 | 57 | 33 | 5.0 |
| 801803 | 108 | 93 | 72 | 46 | 11.0 |
| 801850 | 95 | 89 | 60 | 35 | 6.5 |
| 801894 | 84 | 77 | 67 | 35 | 6.9 |
| 801919 | 83 | 66 | 53 | 30 | 3.8 |
| 801930 | 93 | 115 | 92 | 57 | >12 |
| 801946 | 76 | 55 | 41 | 21 | 2.1 |
| 801965 | 84 | 66 | 58 | 23 | 3.6 |
| 801972 | 98 | 73 | 65 | 35 | 6.2 |
| 801974 | 96 | 82 | 64 | 37 | 6.9 |
| 802029 | 93 | 84 | 63 | 45 | 9.5 |
| 802032 | 83 | 74 | 59 | 29 | 4.6 |
| 802055 | 101 | 89 | 76 | 63 | >12 |
| 802075 | 109 | 109 | 88 | 59 | >12 |
| 802094 | 74 | 50 | 43 | 26 | 2.1 |
| 802095 | 85 | 69 | 51 | 14 | 2.9 |
| 802103 | 90 | 83 | 81 | 68 | >12 |

TABLE 35
Dose-dependent percent reduction of human
SPDEF RNA by modified oligonucleotides

| Compound | SPDEF (% UTC) | | | | |
|---|---|---|---|---|---|
| Number | 234 nM | 938 nM | 3750 nM | 15000 nM | IC₅₀ μM |
| 801766 | 82 | 64 | 37 | 22 | 2.1 |
| 802094 | 82 | 45 | 23 | 13 | 1.1 |
| 832871 | 111 | 88 | 60 | 37 | 7.1 |
| 832904 | 100 | 70 | 37 | 35 | 3.5 |
| 832905 | 88 | 73 | 43 | 26 | 3.1 |
| 832967 | 113 | 83 | 46 | 36 | 5.1 |
| 833000 | 95 | 68 | 46 | 21 | 2.9 |
| 833201 | 65 | 93 | 66 | 28 | 6.3 |
| 833202 | 103 | 67 | 39 | 39 | 4.0 |
| 833266 | 92 | 89 | 69 | 32 | 7.6 |
| 833489 | 97 | 56 | 52 | 47 | 6.0 |
| 833490 | 93 | 58 | 50 | 19 | 2.6 |
| 833601 | 107 | 76 | 51 | 46 | 7.1 |
| 833635 | 83 | 61 | 40 | 17 | 1.9 |
| 833683 | 108 | 100 | 73 | 40 | 11.6 |
| 833715 | 108 | 69 | 39 | 28 | 3.3 |
| 833762 | 89 | 71 | 45 | 25 | 3.0 |
| 833825 | 129 | 111 | 74 | 51 | >15 |
| 833904 | 91 | 68 | 45 | 38 | 4.1 |

TABLE 36
Dose-dependent percent reduction of human
SPDEF RNA by modified oligonucleotides

| Compound | SPDEF (% UTC) | | | | |
|---|---|---|---|---|---|
| Number | 234 nM | 938 nM | 3750 nM | 15000 nM | IC₅₀ μM |
| 802094 | 89 | 46 | 31 | 10 | 1.4 |
| 832988 | 89 | 82 | 48 | 32 | 4.4 |
| 833123 | 70 | 64 | 38 | 27 | 1.8 |
| 833188 | 79 | 72 | 38 | 36 | 3.2 |
| 833204 | 138 | 86 | 66 | 69 | >15 |
| 833270 | 112 | 73 | 47 | 32 | 4.3 |
| 833366 | 92 | 94 | 52 | 36 | 6.3 |
| 833413 | 98 | 81 | 46 | 27 | 3.9 |
| 833491 | 83 | 67 | 34 | 31 | 2.5 |
| 833572 | 89 | 56 | 31 | 25 | 1.9 |
| 833699 | 93 | 68 | 51 | 31 | 3.9 |
| 833733 | 95 | 71 | 60 | 26 | 4.3 |
| 833748 | 126 | 89 | 30 | 16 | 3.2 |
| 833780 | 89 | 70 | 51 | 22 | 3.1 |
| 833813 | 123 | 91 | 30 | 23 | 3.6 |
| 833907 | 101 | 81 | 50 | 32 | 4.8 |
| 833923 | 112 | 106 | 86 | 59 | >15 |
| 833939 | 86 | 97 | 73 | 64 | >15 |
| 833973 | 113 | 87 | 54 | 21 | 4.4 |

TABLE 37
Dose-dependent percent reduction of human
SPDEF RNA by modified oligonucleotides

| Compound | SPDEF (% UTC) | | | | |
|---|---|---|---|---|---|
| Number | 234 nM | 938 nM | 3750 nM | 15000 nM | IC₅₀ μM |
| 802094 | 83 | 51 | 37 | 14 | 1.5 |
| 832911 | 73 | 70 | 49 | 28 | 3.0 |
| 832989 | 91 | 80 | 56 | 19 | 3.6 |
| 833240 | 91 | 78 | 50 | 39 | 5.8 |
| 833241 | 90 | 72 | 48 | 25 | 3.2 |
| 833336 | 81 | 51 | 30 | 13 | 1.3 |
| 833350 | 117 | 91 | 62 | 50 | 11.0 |
| 833401 | 86 | 68 | 55 | 32 | 4.2 |
| 833416 | 85 | 80 | 56 | 32 | 5.1 |
| 833561 | 84 | 64 | 39 | 25 | 2.3 |
| 833575 | 82 | 56 | 29 | 16 | 1.5 |
| 833609 | 87 | 89 | 57 | 35 | 6.7 |
| 833767 | 79 | 61 | 41 | 16 | 1.8 |
| 833799 | 102 | 78 | 50 | 38 | 5.5 |
| 833814 | 102 | 76 | 47 | 24 | 3.6 |
| 833816 | 101 | 81 | 48 | 36 | 5.1 |
| 833849 | 102 | 88 | 69 | 56 | >15 |
| 833910 | 81 | 60 | 34 | 19 | 1.7 |
| 833911 | 77 | 51 | 30 | 23 | 1.3 |

TABLE 38
Dose-dependent percent reduction of human
SPDEF RNA by modified oligonucleotides

| Compound | SPDEF (% UTC) | | | | |
|---|---|---|---|---|---|
| Number | 234 nM | 938 nM | 3750 nM | 15000 nM | IC₅₀ μM |
| 802094 | 88 | 55 | 38 | 21 | 1.9 |
| 832881 | 102 | 95 | 94 | 94 | >15 |
| 833041 | 117 | 103 | 100 | 98 | >15 |
| 833211 | 94 | 74 | 46 | 31 | 3.9 |
| 833242 | 46 | 61 | 35 | 14 | 1.7 |
| 833243 | 100 | 69 | 39 | 35 | 3.6 |
| 833276 | 91 | 75 | 50 | 21 | 3.3 |
| 833338 | 107 | 83 | 52 | 29 | 4.7 |
| 833340 | 101 | 86 | 58 | 37 | 6.9 |
| 833419 | 86 | 88 | 66 | 37 | 9.1 |
| 833484 | 92 | 70 | 51 | 22 | 3.2 |
| 833579 | 78 | 61 | 45 | 14 | 1.9 |
| 833580 | 75 | 54 | 36 | 20 | 1.4 |
| 833581 | 99 | 70 | 53 | 30 | 4.2 |
| 833738 | 91 | 96 | 76 | 46 | 13.0 |
| 833756 | 99 | 76 | 48 | 30 | 4.2 |
| 833773 | 94 | 68 | 50 | 32 | 3.9 |
| 833882 | 86 | 75 | 47 | 26 | 3.3 |
| 833962 | 99 | 92 | 68 | 42 | 11.0 |

TABLE 39
Dose-dependent percent reduction of human
SPDEF RNA by modified oligonucleotides

| Compound | SPDEF (% UTC) | | | | |
|---|---|---|---|---|---|
| Number | 234 nM | 938 nM | 3750 nM | 15000 nM | IC₅₀ μM |
| 802094 | 86 | 50 | 26 | 13 | 1.3 |
| 833013 | 83 | 70 | 43 | 20 | 2.4 |
| 833117 | 76 | 81 | 76 | 77 | >15 |
| 833198 | 84 | 77 | 47 | 34 | 4.3 |
| 833277 | 88 | 73 | 56 | 27 | 4.1 |
| 833343 | 102 | 76 | 51 | 28 | 4.2 |
| 833486 | 99 | 85 | 54 | 24 | 4.3 |
| 833487 | 80 | 64 | 42 | 29 | 2.6 |
| 833567 | 75 | 59 | 38 | 17 | 1.5 |
| 833631 | 97 | 75 | 52 | 19 | 3.4 |
| 833678 | 76 | 72 | 46 | 28 | 2.9 |
| 833741 | 84 | 62 | 37 | 21 | 2.0 |
| 833758 | 99 | 77 | 63 | 35 | 6.5 |
| 833868 | 110 | 93 | 79 | 48 | >15 |
| 833886 | 101 | 62 | 47 | 22 | 2.9 |
| 833901 | 98 | 69 | 66 | 24 | 4.6 |
| 833932 | 84 | 70 | 45 | 31 | 3.2 |
| 833965 | 85 | 74 | 48 | 34 | 4.2 |
| 833980 | 76 | 83 | 63 | 44 | 13.0 |

TABLE 40
Dose-dependent percent reduction of human
SPDEF RNA by modified oligonucleotides

| Compound | SPDEF (% UTC) | | | | |
|---|---|---|---|---|---|
| Number | 234 nM | 938 nM | 3750 nM | 15000 nM | IC₅₀ μM |
| 802094 | 93 | 67 | 26 | 15 | 1.9 |
| 833014 | 88 | 94 | 99 | 77 | >15 |
| 833488 | 73 | 57 | 40 | 25 | 1.7 |
| 833536 | 95 | 79 | 67 | 58 | >15 |
| 833711 | 89 | 76 | 58 | 25 | 4.1 |
| 833887 | 71 | 60 | 39 | 22 | 1.6 |
| 833951 | 77 | 70 | 51 | 29 | 3.3 |
| 854182 | 97 | 81 | 55 | 34 | 5.6 |
| 854254 | 77 | 69 | 46 | 14 | 2.1 |
| 854255 | 96 | 76 | 50 | 21 | 3.4 |
| 854302 | 66 | 52 | 35 | 12 | 0.9 |
| 854337 | 75 | 50 | 50 | 16 | 1.6 |
| 854355 | 87 | 74 | 45 | 33 | 3.7 |
| 854452 | 93 | 67 | 47 | 31 | 3.5 |
| 854535 | 79 | 67 | 42 | 12 | 1.9 |
| 854547 | 104 | 92 | 57 | 32 | 6.2 |
| 854577 | 83 | 70 | 46 | 25 | 2.8 |
| 854589 | 78 | 68 | 45 | 22 | 2.3 |
| 854608 | 101 | 74 | 65 | 43 | 9.1 |

TABLE 41
Dose-dependent percent reduction of human
SPDEF RNA by modified oligonucleotides

| Compound | SPDEF (% UTC) | | | | |
|---|---|---|---|---|---|
| Number | 234 nM | 938 nM | 3750 nM | 15000 nM | IC₅₀ μM |
| 802094 | 92 | 59 | 32 | 19 | 1.9 |
| 854183 | 86 | 95 | 68 | 33 | 7.4 |
| 854196 | 100 | 70 | 41 | 24 | 3.0 |
| 854214 | 80 | 69 | 42 | 21 | 2.3 |
| 854215 | 81 | 59 | 46 | 18 | 2.0 |
| 854226 | 89 | 68 | 29 | 14 | 1.9 |
| 854303 | 95 | 78 | 54 | 27 | 4.3 |
| 854338 | 85 | 76 | 52 | 17 | 2.9 |
| 854393 | 77 | 64 | 43 | 26 | 2.3 |
| 854398 | 96 | 75 | 64 | 23 | 4.5 |
| 854453 | 103 | 77 | 49 | 33 | 4.6 |
| 854458 | 88 | 90 | 79 | 50 | >15 |
| 854459 | 80 | 52 | 32 | 17 | 1.4 |
| 854471 | 78 | 68 | 44 | 12 | 1.9 |
| 854472 | 85 | 63 | 38 | 24 | 2.2 |
| 854519 | 91 | 77 | 53 | 23 | 3.6 |
| 854537 | 83 | 63 | 51 | 27 | 3.0 |
| 854538 | 73 | 70 | 37 | 35 | 2.7 |
| 854544 | 97 | 75 | 47 | 35 | 4.5 |

TABLE 42
Dose-dependent percent reduction of human
SPDEF RNA by modified oligonucleotides

| Compound | SPDEF (% UTC) | | | | |
|---|---|---|---|---|---|
| Number | 234 nM | 938 nM | 3750 nM | 15000 nM | IC₅₀ μM |
| 802094 | 84 | 66 | 37 | 25 | 2.3 |
| 854204 | 94 | 85 | 60 | 40 | 8.3 |
| 854211 | 115 | 106 | 93 | 59 | >15 |
| 854216 | 79 | 87 | 52 | 36 | 5.8 |
| 854227 | 87 | 62 | 39 | 17 | 2.0 |
| 854234 | 123 | 108 | 89 | 49 | >15 |
| 854235 | 89 | 85 | 49 | 37 | 5.4 |
| 854252 | 90 | 82 | 59 | 43 | 9.0 |
| 854288 | 108 | 92 | 63 | 41 | 8.8 |
| 854340 | 77 | 72 | 44 | 31 | 3.1 |
| 854353 | 93 | 84 | 64 | 56 | >15 |
| 854360 | 101 | 95 | 84 | 50 | >15 |
| 854376 | 89 | 88 | 50 | 19 | 3.5 |
| 854390 | 90 | 78 | 48 | 36 | 4.9 |
| 854486 | 99 | 97 | 78 | 66 | >15 |
| 854526 | 68 | 60 | 41 | 17 | 1.4 |
| 854527 | 95 | 64 | 38 | 12 | 2.1 |
| 854545 | 84 | 85 | 40 | 11 | 2.5 |
| 854575 | 95 | 91 | 63 | 28 | 6.1 |

TABLE 43
Dose-dependent percent reduction of human SPDEF
RNA by modified oligonucleotides

| Compound | SPDEF (% UTC) | | | | | IC₅₀ |
|---|---|---|---|---|---|---|
| Number | 148 nM | 444 nM | 1333 nM | 4000 nM | 12000 nM | μM |
| 801683 | 87 | 75 | 73 | 71 | 44 | >12 |
| 801766 | 101 | 100 | 73 | 48 | 33 | 4.6 |
| 801808 | 104 | 87 | 69 | 42 | 30 | 3.4 |
| 801907 | 125 | 110 | 85 | 51 | 20 | 4.3 |
| 801909 | 86 | 67 | 50 | 17 | 17 | 1.1 |
| 801950 | 128 | 94 | 50 | 31 | 18 | 2.3 |
| 801958 | 96 | 88 | 67 | 44 | 21 | 2.8 |
| 801983 | 112 | 98 | 81 | 68 | 39 | 8.6 |
| 802030 | 50 | 96 | 78 | 53 | 28 | 4.5 |
| 802043 | 104 | 86 | 49 | 30 | 14 | 1.8 |
| 802048 | 107 | 101 | 70 | 54 | 42 | 6.1 |
| 802053 | 120 | 110 | 89 | 61 | 35 | 7.0 |
| 802094 | 81 | 59 | 52 | 25 | 23 | 1.2 |
| 802098 | 103 | 80 | 47 | 24 | 12 | 1.5 |

TABLE 44
Dose-dependent percent reduction of human
SPDEF RNA by modified oligonucleotides

| Compound | SPDEF (% UTC) | | | | |
|---|---|---|---|---|---|
| Number | 556 nM | 1667 nM | 5000 nM | 15000 nM | IC₅₀ μM |
| 833814 | 88 | 56 | 41 | 18 | 3.0 |
| 854302 | 71 | 51 | 22 | 15 | 1.6 |
| 936070 | 60 | 29 | 23 | 10 | 0.7 |
| 936110 | 82 | 58 | 29 | 33 | 3.0 |
| 936148 | 51 | 39 | 29 | 19 | 0.6 |
| 936292 | 69 | 61 | 52 | 30 | 3.8 |
| 936299 | 75 | 61 | 38 | 19 | 2.6 |
| 936301 | 72 | 73 | 38 | 33 | 3.9 |
| 936310 | 71 | 49 | 36 | 20 | 2.0 |
| 936315 | 71 | 61 | 46 | 21 | 2.9 |
| 936316 | 66 | 57 | 36 | 21 | 2.0 |
| 936317 | 86 | 70 | 50 | 36 | 5.7 |
| 936336 | 99 | 77 | 83 | 25 | 8.3 |
| 936381 | 66 | 55 | 31 | 21 | 1.8 |
| 936396 | 73 | 43 | 38 | 27 | 2.0 |
| 936415 | 69 | 56 | 48 | 14 | 2.4 |
| 936416 | 74 | 40 | 54 | 24 | 2.5 |
| 936421 | 87 | 88 | 78 | 38 | 14.4 |
| 936429 | 79 | 65 | 40 | 32 | 3.8 |

TABLE 45
Dose-dependent percent reduction of human
SPDEF RNA by modified oligonucleotides

| Compound | SPDEF (% UTC) | | | | |
|---|---|---|---|---|---|
| Number | 556 nM | 1667 nM | 5000 nM | 15000 nM | IC₅₀ μM |
| 833814 | 74 | 59 | 37 | 24 | 2.6 |
| 854302 | 68 | 39 | 20 | 17 | 1.2 |
| 936068 | 78 | 65 | 48 | 37 | 5.1 |
| 936069 | 78 | 62 | 47 | 17 | 3.1 |
| 936081 | 66 | 42 | 27 | 14 | 1.3 |
| 936082 | 67 | 51 | 35 | 27 | 1.9 |
| 936088 | 73 | 60 | 29 | 20 | 2.2 |
| 936111 | 100 | 87 | 66 | 37 | 9.4 |
| 936121 | 78 | 59 | 43 | 24 | 3.1 |
| 936135 | 93 | 62 | 38 | 38 | 4.5 |
| 936142 | 67 | 47 | 27 | 13 | 1.4 |
| 936147 | 71 | 54 | 35 | 20 | 2.1 |
| 936150 | 72 | 57 | 43 | 24 | 2.7 |
| 936158 | 68 | 56 | 31 | 28 | 2.1 |
| 936258 | 67 | 34 | 21 | 10 | 1.0 |
| 936442 | 64 | 74 | 48 | 21 | 3.2 |
| 936453 | 79 | 53 | 47 | 25 | 3.0 |
| 936456 | 77 | 57 | 49 | 32 | 3.9 |
| 936458 | 68 | 51 | 32 | 17 | 1.7 |

TABLE 46
Dose-dependent percent reduction of human
SPDEF RNA by modified oligonucleotides

| Compound | SPDEF (% UTC) | | | | |
|---|---|---|---|---|---|
| Number | 556 nM | 1667 nM | 5000 nM | 15000 nM | IC₅₀ μM |
| 833814 | 89 | 62 | 47 | 34 | 4.7 |
| 854302 | 64 | 34 | 33 | 20 | 1.1 |
| 936096 | 81 | 61 | 43 | 15 | 2.9 |
| 936097 | 90 | 77 | 44 | 37 | 5.7 |
| 936100 | 83 | 72 | 47 | 27 | 4.4 |
| 936102 | 95 | 83 | 61 | 33 | 7.5 |
| 936104 | 73 | 58 | 32 | 17 | 2.1 |
| 936106 | 69 | 61 | 45 | 34 | 3.6 |
| 936137 | 89 | 93 | 54 | 50 | 13.0 |
| 936139 | 104 | 84 | 53 | 62 | >15.0 |
| 936141 | 84 | 73 | 49 | 31 | 5.0 |
| 936169 | 65 | 49 | 30 | 33 | 1.7 |
| 936174 | 70 | 56 | 48 | 40 | 4.3 |
| 936179 | 97 | 86 | 53 | 32 | 6.6 |
| 936180 | 75 | 66 | 51 | 19 | 3.4 |
| 936184 | 74 | 63 | 44 | 25 | 3.2 |
| 936218 | 72 | 58 | 44 | 22 | 2.7 |
| 936256 | 90 | 76 | 55 | 36 | 6.8 |
| 936257 | 71 | 56 | 39 | 24 | 2.4 |

TABLE 47
Dose-dependent percent reduction of human
SPDEF RNA by modified oligonucleotides

| Compound | SPDEF (% UTC) | | | | |
|---|---|---|---|---|---|
| Number | 556 nM | 1667 nM | 5000 nM | 15000 nM | IC₅₀ μM |
| 833814 | 89 | 67 | 52 | 28 | 4.7 |
| 854302 | 55 | 35 | 21 | 18 | 0.6 |
| 936191 | 79 | 69 | 46 | 17 | 3.3 |
| 936192 | 77 | 62 | 38 | 45 | 4.7 |
| 936194 | 104 | 82 | 56 | 34 | 6.9 |
| 936198 | 66 | 60 | 41 | 28 | 2.6 |
| 936199 | 84 | 27 | 52 | 25 | 2.3 |
| 936208 | 75 | 64 | 44 | 33 | 3.9 |
| 936212 | 87 | 70 | 48 | 46 | 7.7 |
| 936214 | 68 | 36 | 40 | 21 | 1.4 |
| 936247 | 92 | 73 | 53 | 26 | 5.1 |
| 936249 | 84 | 62 | 56 | 35 | 5.5 |
| 936251 | 83 | 54 | 35 | 21 | 2.6 |
| 936252 | 61 | 38 | 30 | 22 | 1.0 |
| 936268 | 66 | 40 | 52 | 21 | 1.8 |
| 936273 | 107 | 82 | 58 | 32 | 6.9 |
| 936279 | 77 | 62 | 34 | 19 | 2.6 |
| 936284 | 74 | 82 | 47 | 30 | 4.9 |
| 936286 | 78 | 65 | 55 | 48 | 10.3 |

### Example 4: Tolerability of Modified Oligonucleotides Targeting Human SPDEF in CD-1 Mice

[0651] CD-1 mice are a multipurpose mouse model frequently utilized for safety and efficacy testing. The mice were treated with modified oligonucleotides selected from studies described above and evaluated for changes in the levels of various plasma chemistry markers.

### Study 1

[0652] Groups of four 6-to-8-week-old male CD-1 mice were injected subcutaneously once a week for six weeks (for a total of 6 treatments) with 50 mg/kg of modified oligonucleotides. One group of four male CD-1 mice was injected with saline. Mice were euthanized 72 hours following the final administration.

[0653] To evaluate the effect of modified oligonucleotides on liver and kidney function, plasma levels of aspartate aminotransferase (AST), alanine aminotransferase (ALT), total bilirubin (TBIL), blood urea nitrogen (BUN), creatinine (CRT) and albumin were measured using an automated clinical chemistry analyzer (Hitachi Olympus AU400c, Melville, N.Y.). The results are presented in the table below. Assays include four animals in a group, except where an asterisk (*) indicates that 3 animals or less was used for a specific assay. Modified oligonucleotides that caused changes in the levels of any of the liver or kidney function markers outside the expected range for modified oligonucleotides were excluded in further studies.

TABLE 49
Plasma chemistry markers in male CD-1 mice

| Compound | AST | ALT | TBIL | BUN | CRT | Albumin |
|---|---|---|---|---|---|---|
| No. | (IU/L) | (IU/L) | (mg/dL) | (mg/dL) | (mg/dL) | (mg/dL) |
| saline | 42 | 32 | 0.2 | 11* | 0.08 | 2.6 |
| 652522 | 1247 | 1720 | 0.2 | 14* | 0.09 | 2.6 |
| 801727 | 89 | 157 | 0.1 | 28 | 0.06 | 2.7 |
| 801919 | 103 | 102 | 0.2 | 26 | 0.10 | 2.6 |
| 801946 | 726 | 992 | 0.3 | 26 | 0.10 | 3.0 |
| 801965 | 238 | 376 | 0.2 | 24 | 0.06 | 2.7 |
| 802032 | 74 | 95 | 0.2 | 27 | 0.08 | 2.7 |
| 802094 | 738 | 999 | 0.2 | 24 | 0.08 | 2.6 |
| 802095 | 266 | 325 | 0.1 | 27 | 0.07 | 2.5 |

[0654] Body weights of CD-1 mice were measured at days 1 and 39, and the average body weight for each group is presented in the table below. Liver, kidney and spleen weights were measured at the end of the study and are presented in the table below. Modified oligonucleotides that caused any changes in organ weights outside the expected range for modified oligonucleotides were excluded from further studies.

TABLE 50
Body and organ weights (in grams)

| Compound | Body Weight (g) | | Liver | Kidney | Spleen |
|---|---|---|---|---|---|
| No. | Day 1 | Day 39 | (g) | (g) | (g) |
| saline | 32 | 39 | 2.0 | 0.5 | 0.1 |
| 652522 | 32 | 38 | 2.9 | 0.6 | 0.2 |
| 801727 | 33 | 39 | 2.6 | 0.6 | 0.1 |
| 801919 | 35 | 40 | 2.4 | 0.6 | 0.2 |
| 801946 | 33 | 35 | 1.7 | 0.6 | 0.1 |
| 801965 | 34 | 40 | 2.4 | 0.8 | 0.1 |
| 802032 | 34 | 38 | 2.2 | 0.6 | 0.1 |
| 802094 | 35 | 39 | 2.5 | 0.7 | 0.2 |
| 802095 | 35 | 42 | 2.9 | 0.7 | 0.2 |

### Study 2

[0655] Groups of 6-to-8-week-old male CD-1 mice were injected subcutaneously once a week for six weeks (for a total of 6 treatments) with 50 mg/kg of modified oligonucleotides. One group of male CD-1 mice was injected with PBS. Mice were euthanized 48 hours following the final administration.

[0656] To evaluate the effect of modified oligonucleotides on liver and kidney function, plasma levels of aspartate aminotransferase (AST), alanine aminotransferase (ALT), total bilirubin (TBIL), blood urea nitrogen (BUN), creatinine (CRT) and albumin were measured using an automated clinical chemistry analyzer (Hitachi Olympus AU400c, Melville, N.Y.). The results are presented in the table below. Modified oligonucleotides that caused changes in the levels of any of the liver or kidney function markers outside the expected range for modified oligonucleotides were excluded in further studies.

TABLE 51
Plasma chemistry markers in male CD-1 mice

| Compound | AST | ALT | TBIL | BUN | CRT | Albumin |
|---|---|---|---|---|---|---|
| No. | (IU/L) | (IU/L) | (mg/dL) | (mg/dL) | (mg/dL) | (mg/dL) |
| saline | 43 | 32 | 0.2 | 26 | 0.08 | 2.9 |
| 832911 | 174 | 412 | 0.1 | 36 | 0.11 | 3.1 |
| 833000 | 156 | 163 | 0.2 | 23 | 0.06 | 2.8 |
| 833013 | 649 | 1103 | 0.2 | 23 | 0.08 | 2.8 |
| 833188 | 2108 | 2158 | 0.3 | 22 | 0.09 | 3.3 |
| 833211 | 794 | 1629 | 1.1 | 22 | 0.08 | 2.8 |
| 833241 | 88 | 87 | 0.1 | 27 | 0.06 | 2.8 |
| 833243 | 95 | 57 | 0.1 | 24 | 0.06 | 2.7 |
| 833270 | 202 | 150 | 0.3 | 27 | 0.06 | 2.6 |
| 833343 | 539 | 527 | 0.4 | 23 | 0.05 | 2.7 |
| 833401 | 153 | 194 | 0.2 | 26 | 0.09 | 3.3 |
| 833413 | 235 | 357 | 0.2 | 21 | 0.04 | 2.5 |
| 833484 | 337 | 739 | 0.1 | 23 | 0.07 | 2.8 |
| 833486 | 87 | 111 | 0.1 | 21 | 0.04 | 2.6 |
| 833487 | 143 | 569 | 0.1 | 26 | 0.08 | 2.8 |
| 833488 | 198 | 353 | 0.1 | 18 | 0.05 | 2.9 |
| 833490 | 606 | 1042 | 0.2 | 18 | 0.10 | 3.6 |
| 833561 | 75 | 60 | 0.1 | 24 | 0.05 | 2.8 |
| 833580 | 89 | 125 | 0.1 | 21 | 0.09 | 2.9 |
| 833581 | 67 | 42 | 0.1 | 25 | 0.05 | 2.6 |
| 833631 | 108 | 77 | 0.1 | 21 | 0.04 | 2.7 |
| 833635 | 52 | 42 | 0.1 | 27 | 0.06 | 2.7 |
| 833678 | 445 | 392 | 0.4 | 19 | 0.04 | 2.6 |
| 833699 | 54 | 35 | 0.2 | 21 | 0.04 | 2.6 |
| 833711 | 98 | 117 | 0.1 | 22 | 0.03 | 2.5 |
| 833715 | 288 | 420 | 0.1 | 23 | 0.09 | 3.0 |
| 833733 | 514 | 545 | 0.1 | 19 | 0.04 | 2.6 |
| 833741 | 91 | 50 | 0.2 | 25 | 0.06 | 2.9 |

[0657] Body weights of CD-1 mice were measured at days 1 and 37, and the average body weight for each group is presented in the table below. Liver, kidney and spleen weights were measured at the end of the study and are presented in the table below. Modified oligonucleotides that caused any changes in organ weights outside the expected range for modified oligonucleotides were excluded from further studies.

TABLE 52
Body and organ weights (in grams)

| Compound | Body Weight (g) | | Liver | Kidney | Spleen |
|---|---|---|---|---|---|
| No. | Day 1 | Day 37 | (g) | (g) | (g) |
| saline | 34 | 43 | 2.3 | 0.6 | 0.1 |
| 832911 | 33 | 40 | 3.4 | 0.5 | 0.1 |
| 833000 | 34 | 41 | 2.8 | 0.6 | 0.1 |
| 833013 | 34 | 37 | 2.6 | 0.6 | 0.2 |
| 833188 | 33 | 40 | 4.1 | 0.7 | 0.3 |
| 833211 | 35 | 39 | 4.2 | 0.6 | 0.3 |
| 833241 | 33 | 38 | 2.2 | 0.5 | 0.1 |
| 833243 | 35 | 43 | 2.7 | 0.6 | 0.1 |
| 833270 | 34 | 43 | 3.3 | 0.6 | 0.5 |
| 833343 | 33 | 37 | 2.5 | 0.6 | 0.1 |
| 833401 | 35 | 43 | 2.7 | 0.6 | 0.1 |
| 833413 | 35 | 43 | 2.5 | 0.7 | 0.2 |
| 833484 | 33 | 42 | 3.3 | 0.6 | 0.2 |
| 833486 | 33 | 44 | 2.9 | 0.6 | 0.1 |
| 833487 | 34 | 43 | 3.2 | 0.6 | 0.1 |
| 833488 | 34 | 40 | 2.6 | 0.6 | 0.1 |
| 833490 | 33 | 39 | 3.3 | 0.6 | 0.2 |
| 833561 | 33 | 41 | 2.4 | 0.6 | 0.1 |
| 833580 | 35 | 41 | 2.7 | 0.6 | 0.1 |
| 833581 | 34 | 42 | 2.5 | 0.6 | 0.1 |
| 833631 | 32 | 41 | 2.5 | 0.6 | 0.2 |
| 833635 | 35 | 41 | 2.4 | 0.5 | 0.1 |
| 833678 | 33 | 39 | 2.6 | 0.6 | 0.2 |
| 833699 | 35 | 44 | 2.4 | 0.6 | 0.1 |
| 833711 | 35 | 41 | 2.7 | 0.6 | 0.2 |
| 833715 | 32 | 39 | 3.0 | 0.6 | 0.1 |
| 833733 | 34 | 40 | 2.9 | 0.6 | 0.2 |
| 833741 | 34 | 41 | 2.4 | 0.6 | 0.1 |

### Study 3

[0658] Groups of 6-to-8-week-old male CD-1 mice were injected subcutaneously once a week for six weeks (for a total of 6 treatments) with 50 mg/kg of modified oligonucleotides. One group of male CD-1 mice was injected with PBS. Mice were euthanized 48 hours following the final administration.

[0659] To evaluate the effect of modified oligonucleotides on liver and kidney function, plasma levels of aspartate aminotransferase (AST), alanine aminotransferase (ALT), total bilirubin (TBIL), blood urea nitrogen (BUN), creatinine (CRT) and albumin were measured using an automated clinical chemistry analyzer (Hitachi Olympus AU400c, Melville, N.Y.). The results are presented in the table below. Assays include four animals in a group, except where an asterisk (*) indicates that 3 animals or less was used for a specific assay. Modified oligonucleotides that caused changes in the levels of any of the liver or kidney function markers outside the expected range for modified oligonucleotides were excluded in further studies.

TABLE 53
Plasma chemistry markers in male CD-1 mice

| Compound | AST | ALT | TBIL | BUN | CRT | Albumin |
|---|---|---|---|---|---|---|
| No. | (IU/L) | (IU/L) | (mg/dL) | (mg/dL) | (mg/dL) | (mg/dL) |
| saline | 44 | 27 | 0.2 | 20 | 0.08 | 2.5 |
| 833748 | 94 | 64 | 0.2 | 20 | 0.08 | 2.4 |
| 833756 | 803 | 1338 | 0.3 | 19 | 0.08 | 2.9 |
| 833762 | 119 | 128 | 0.2 | 17 | 0.07 | 2.5 |
| 833767 | 95 | 129 | 0.2 | 22 | 0.07 | 2.5 |
| 833773 | 148 | 228 | 0.3 | 19 | 0.09 | 2.5 |
| 833813 | 71 | 43 | 0.2 | 19 | 0.07 | 2.4 |
| 833814 | 942 | 1598 | 0.2 | 17 | 0.08 | 2.4 |
| 833882 | 75 | 39 | 0.2 | 25 | 0.07 | 2.3 |
| 833886 | 167 | 142 | 0.2 | 21 | 0.08 | 2.5 |
| 833887 | 66 | 47 | 0.2 | 19 | 0.07 | 2.4 |
| 833904 | 110 | 94 | 0.2 | 18 | 0.07 | 2.5 |
| 833910 | 241 | 265 | 0.2 | 23 | 0.08 | 2.6 |
| 833951 | 252 | 425 | 0.2 | 13 | 0.05 | 2.3 |
| 833965 | 92 | 50 | 0.2 | 20 | 0.09 | 2.5 |
| 833973 | 129 | 94 | 0.2 | 18 | 0.07 | 2.4 |
| 854214 | 948 | 933 | 0.5 | 35 | 0.10 | 2.3 |
| 854254 | 296 | 471 | 0.2 | 19 | 0.07 | 2.6 |
| 854255 | 73 | 56 | 0.2 | 20 | 0.06 | 2.6 |
| 854302 | 255 | 283 | 0.2 | 23 | 0.11 | 2.5 |
| 854376 | 1485 | 2361 | 0.4 | 20 | 0.07 | 2.4 |
| 854459 | 100 | 104 | 0.2 | 21 | 0.06 | 2.4 |
| 854471* | 107 | 41 | 0.2 | 18 | 0.07 | 2.6 |
| 854527 | 1503 | 1976 | 0.4 | 17 | 0.07 | 2.5 |
| 854535 | 359 | 391 | 0.2 | 20 | 0.06 | 2 |
| 854537 | 358 | 475 | 0.2 | 20 | 0.09 | 2.5 |
| 854545 | 79 | 83 | 0.1 | 19 | 0.06 | 2.4 |

[0660] Body weights of CD-1 mice were measured at days 1 and 37, and the average body weight for each group is presented in the table below. Liver, kidney and spleen weights were measured at the end of the study and are presented in the table below. Modified oligonucleotides that caused any changes in organ weights outside the expected range for modified oligonucleotides were excluded from further studies.

TABLE 54
Body and organ weights (in grams)

| Compound | Body Weight (g) | | Liver | Kidney | Spleen |
|---|---|---|---|---|---|
| No. | Day 1 | Day 37 | (g) | (g) | (g) |
| saline | 32 | 39 | 1.9 | 0.5 | 0.1 |
| 833748 | 32 | 40 | 2.2 | 0.6 | 0.2 |
| 833756 | 31 | 37 | 2.7 | 0.5 | 0.1 |
| 833762 | 32 | 40 | 2.1 | 0.6 | 0.3 |
| 833767 | 31 | 40 | 2.3 | 0.6 | 0.2 |
| 833773 | 32 | 38 | 2.2 | 0.6 | 0.1 |
| 833813 | 32 | 38 | 2.0 | 0.6 | 0.2 |
| 833814 | 31 | 39 | 2.9 | 0.5 | 0.2 |
| 833882 | 32 | 40 | 2.1 | 0.6 | 0.2 |
| 833886 | 32 | 38 | 1.9 | 0.6 | 0.1 |
| 833887 | 32 | 38 | 2.0 | 0.6 | 0.1 |
| 833904 | 34 | 41 | 2.5 | 0.6 | 0.2 |
| 833910 | 32 | 38 | 2.0 | 0.6 | 0.1 |
| 833951 | 34 | 41 | 2.5 | 0.6 | 0.2 |
| 833965 | 32 | 40 | 2.2 | 0.6 | 0.1 |
| 833973 | 34 | 41 | 2.3 | 0.6 | 0.2 |
| 854214 | 33 | 38 | 1.5 | 0.5 | 0.1 |
| 854254 | 33 | 40 | 2.4 | 0.6 | 0.1 |
| 854255 | 32 | 39 | 2.2 | 0.6 | 0.1 |
| 854302 | 34 | 38 | 2.7 | 0.5 | 0.2 |
| 854376 | 33 | 35 | 2.4 | 0.5 | 0.1 |
| 854459 | 32 | 40 | 2.2 | 0.6 | 0.1 |
| 854471 | 35 | 42 | 2.2 | 0.6 | 0.2 |
| 854527 | 31 | 35 | 2.1 | 0.5 | 0.2 |
| 854535 | 33 | 40 | 2.7 | 0.6 | 0.3 |
| 854537 | 34 | 39 | 2.6 | 0.5 | 0.1 |
| 854545 | 33 | 40 | 2.1 | 0.6 | 0.2 |

### Study 4

[0661] Groups of 6-to-8-week-old male CD-1 mice were injected subcutaneously once a week for six weeks (for a total of 6 treatments) with 50 mg/kg of modified oligonucleotides. One group of male CD-1 mice was injected with PBS. Mice were euthanized 48 hours following the final administration.

[0662] To evaluate the effect of modified oligonucleotides on liver and kidney function, plasma levels of aspartate aminotransferase (AST), alanine aminotransferase (ALT), total bilirubin (TBIL), blood urea nitrogen (BUN), creatinine (CRT) and albumin were measured using an automated clinical chemistry analyzer (Hitachi Olympus AU400c, Melville, N.Y.). The results are presented in the table below. Assays include four animals in a group, except where an asterisk (*) indicates that 3 animals or less was used for a specific assay. Modified oligonucleotides that caused changes in the levels of any of the liver or kidney function markers outside the expected range for modified oligonucleotides were excluded in further studies.

TABLE 55
Plasma chemistry markers in male CD-1 mice

| Compound | AST | ALT | TBIL | BUN | CRT | Albumin |
|---|---|---|---|---|---|---|
| No. | (IU/L) | (IU/L) | (mg/dL) | (mg/dL) | (mg/dL) | (mg/dL) |
| saline | 48 | 32 | 0.2 | 22 | 0.08 | 2.6 |
| 854302 | 179 | 206 | 0.2 | 27 | 0.13 | 2.5 |
| 936069 | 90 | 77 | 0.2 | 24 | 0.10 | 2.8 |
| 936088 | 53 | 35 | 0.1 | 25 | 0.10 | 2.4 |
| 936096 | 61 | 48 | 0.2 | 23 | 0.09 | 2.6 |
| 936100 | 83 | 81 | 0.1 | 20 | 0.07 | 2.5 |
| 936104 | 51 | 44 | 0.2 | 19 | 0.10 | 2.8 |
| 936110 | 123 | 93 | 0.2 | 19 | 0.06 | 2.3 |
| 936142 | 64 | 45 | 0.2 | 23 | 0.08 | 2.5 |
| 936147 | 294 | 429 | 0.2 | 20 | 0.06 | 2.5 |
| 936158 | 96 | 90 | 0.2 | 21 | 0.06 | 2.4 |
| 936169* | 53 | 30 | 0.2 | 21 | 0.08 | 2.6 |
| 936198 | 67 | 46 | 0.1 | 21 | 0.06 | 2.5 |
| 936199 | 51 | 31 | 0.1 | 23 | 0.08 | 2.6 |
| 936208 | 125 | 106 | 0.2 | 27 | 0.08 | 2.5 |
| 936214 | 48 | 55 | 0.1 | 19 | 0.06 | 2.6 |
| 936218 | 43 | 38 | 0.2 | 18 | 0.07 | 2.7 |
| 936251 | 373 | 551 | 0.2 | 17 | 0.09 | 2.7 |
| 936268 | 85 | 60 | 0.1 | 18 | 0.06 | 2.5 |
| 936279 | 66 | 43 | 0.1 | 23 | 0.06 | 2.5 |
| 936315 | 314 | 457 | 0.1 | 18 | 0.03 | 2.5 |
| 936415 | 98 | 132 | 0.1 | 19 | 0.09 | 2.8 |

[0663] Body weights of CD-1 mice were measured at days 1 and 37, and the average body weight for each group is presented in the table below. Liver, kidney and spleen weights were measured at the end of the study and are presented in the table below. Modified oligonucleotides that caused any changes in organ weights outside the expected range for modified oligonucleotides were excluded from further studies.

TABLE 56
Body and organ weights (in grams)

| Compound | Body Weight (g) | | Liver | Kidney | Spleen |
|---|---|---|---|---|---|
| No. | Day 1 | Day 37 | (g) | (g) | (g) |
| saline | 29 | 35 | 1.9 | 0.5 | 0.1 |
| 854302 | 29 | 33 | 2.3 | 0.5 | 0.2 |
| 936069 | 29 | 35 | 2.2 | 0.5 | 0.1 |
| 936088 | 31 | 38 | 2.3 | 0.5 | 0.1 |
| 936096 | 31 | 37 | 2.1 | 0.6 | 0.1 |
| 936100 | 29 | 33 | 1.9 | 0.5 | 0.2 |
| 936104 | 29 | 38 | 2.0 | 0.6 | 0.1 |
| 936110 | 30 | 36 | 2.3 | 0.5 | 0.2 |
| 936142 | 29 | 35 | 1.9 | 0.5 | 0.1 |
| 936147 | 29 | 35 | 2.2 | 0.5 | 0.1 |
| 936158 | 29 | 35 | 2.0 | 0.5 | 0.2 |
| 936169* | 30 | 37 | 1.9 | 0.7 | 0.2 |
| 936198 | 29 | 37 | 2.0 | 0.6 | 0.1 |
| 936199 | 29 | 35 | 2.1 | 0.5 | 0.2 |
| 936208 | 29 | 35 | 2.2 | 0.5 | 0.1 |
| 936214 | 31 | 37 | 2.2 | 0.6 | 0.1 |
| 936218 | 29 | 36 | 2.0 | 0.6 | 0.2 |
| 936251 | 29 | 33 | 1.9 | 0.5 | 0.2 |
| 936268 | 31 | 39 | 2.2 | 0.6 | 0.2 |
| 936279 | 30 | 36 | 2.0 | 0.6 | 0.1 |
| 936315 | 29 | 37 | 2.6 | 0.5 | 0.2 |
| 936415 | 30 | 37 | 2.5 | 0.5 | 0.1 |

### Example 5: Local Tolerability of Modified Oligonucleotides Targeting Human SPDEF in CD-1 Mice

[0664] CD-1 mice are a multipurpose mouse model frequently utilized for safety and efficacy testing. The mice were treated with modified oligonucleotides selected from studies described above and evaluated for changes in the levels of various plasma chemistry markers.

### Study 1

[0665] Groups of 7-to-8-week-old male CD-1 mice were dosed orotracheally once a week for six weeks (for a total of 6 treatments) with 20 mg/kg of modified oligonucleotides. One group of male CD-1 mice was treated with saline. Mice were euthanized 48 hours following the final administration.

[0666] Body weights of CD-1 mice were measured at days 1 and 36, and the average body weight for each group is presented in the table below. Modified oligonucleotides that caused any changes in organ weights outside the expected range for modified oligonucleotides were excluded from further studies.

TABLE 57
Body weights (in grams)

| | |
|---|---|
| ION | Body Weight (g) |

| No. | Day 1 | Day 36 |
|---|---|---|
| Saline | 31 | 38 |
| 801727 | 33 | 41 |
| 801919 | 32 | 40 |
| 802032 | 33 | 40 |
| 833000 | 31 | 39 |
| 833241 | 32 | 38 |
| 833243 | 33 | 42 |
| 833401 | 30 | 36 |
| 833486 | 32 | 40 |
| 833561 | 31 | 37 |
| 833580 | 30 | 37 |
| 833581 | 31 | 39 |
| 833631 | 32 | 39 |
| 833635 | 32 | 40 |
| 833699 | 32 | 39 |
| 833711 | 31 | 40 |
| 833741 | 32 | 39 |

Bronchoalveolar Lavage (BAL) cellular profile

[0667] To evaluate the effect of modified oligonucleotides on lung function, levels of macrophages (MAC), neutrophils (NEU), lymphocytes (LYM), and eosinophils (EOS) in the bronchoalveolar lavage fluid (BAL) were measured. Mouse lungs were lavaged two times with 0.5 ml of PBS containing 1% BSA (Sigma-Aldrich). BAL fluid samples were centrifuged to generate a cell pellet and a cell-free supernatant. The recovered airway cells were resuspended in PBS with 1% BSA, and a cytospin was performed. Cells were stained with Diff-Quik stain (VWR). Data are presented as the percent of cells present in the total recovered BAL cell population.

[0668] Modified oligonucleotides that caused changes in the levels of any of the BAL markers outside the expected range for modified oligonucleotides were excluded in further studies. In some cases, where less than 4 samples were available in a group, the values are marked with an asterisk (*)

TABLE 58
Cellular profile in BAL

| Compound No. | MAC (%) | LYM (%) | EOS (%) | NEU (%) |
|---|---|---|---|---|
| saline | 97 | 2.3 | 0.0 | 0.8 |
| 801727 | 72 | 18.3 | 0.0 | 10.0 |
| 801919 | 87 | 4.8 | 0.3 | 8.3 |
| 802032 | 67* | 16.3* | 1.0* | 15.3* |
| 833000 | 71 | 14.8 | 0.8 | 16.5 |
| 833241 | 72* | 17.3* | 2.3* | 8.3* |
| 833243 | 76* | 10.3* | 3.3* | 10.3* |
| 833401 | 74 | 16.8 | 0.0 | 9.8 |
| 833486 | 64 | 17.0 | 0.0 | 19.0 |
| 833561 | 88* | 4.0* | 0.0* | 8.0* |
| 833580 | 94 | 3.5 | 0.0 | 2.8 |
| 833581 | 87 | 4.3 | 0.0 | 9.3 |
| 833631 | 95 | 5.8 | 0.0 | 4.8 |
| 833635 | 84 | 6.0 | 0.0 | 8.5 |
| 833699 | 85 | 9.5 | 1.5 | 2.5 |
| 833711 | 82 | 19.0 | 1.3 | 5.8 |
| 833741 | 88 | 7.5 | 1.0 | 3.3 |

### Bronchoalveolar Lavage (BAL) Cytokine Profile

[0669] To evaluate the effect of modified oligonucleotides on lung function, levels of Interleukin-10 (IL-10), Interleukin-6 (IL-6), monocyte chemotactic protein (MCP)-1/CCL2 and macrophage inflammatory protein (MIP)1β/CCL4 in the bronchoalveolar lavage fluid (BAL) were measured. BAL fluid was analyzed with MULTI_SPOT 96-well 4 spot prototype mouse 4-plex from MSD #N45ZA-1.

[0670] The results are presented in the table below. Modified oligonucleotides that caused changes in the levels of any of the BAL cytokines outside the expected range for modified oligonucleotides were excluded in further studies.

TABLE 60
Body weights (in grams)

| Compound | Body Weight (g) | |
|---|---|---|
| No. | Day 1 | Day 37 |
| saline | 31 | 39 |
| 833748 | 33 | 40 |
| 833762 | 33 | 39 |
| 833767 | 32 | 38 |
| 833813 | 31 | 37 |
| 833882 | 33 | 41 |
| 833886 | 31 | 36 |
| 833887 | 33 | 40 |
| 833904 | 33 | 38 |
| 833965 | 33 | 40 |
| 833973 | 31 | 37 |
| 854255 | 31 | 38 |
| 854459 | 32 | 38 |
| 854471 | 31 | 37 |
| 854545 | 32 | 39 |

### Bronchoalveolar Lavage (BAL) Cellular Profile

[0671] To evaluate the effect of modified oligonucleotides on lung function, levels of macrophages (MAC), neutrophils (NEU), lymphocytes (LYM), and eosinophils (EOS) in the bronchoalveolar lavage fluid (BAL) were measured. Mouse lungs were lavaged two times with 0.5 ml of PBS containing 1% BSA (Sigma-Aldrich). BAL fluid samples were centrifuged to generate a cell pellet and a cell-free supernatant. The recovered airway cells were resuspended in PBS with 1% BSA, and a cytospin was performed. Cells were stained with Diff-Quik stain (VWR). Data are presented as the percent of cells present in the total recovered BAL cell population.

[0672] Modified oligonucleotides that caused changes in the levels of any of the BAL markers outside the expected range for modified oligonucleotides were excluded in further studies. In some cases, where less than 4 samples were available in a group, the values are marked with an asterisk (*).

TABLE 61
Cellular profile in BAL

| Compound No. | MAC (%) | LYM (%) | EOS (%) | NEU (%) |
|---|---|---|---|---|
| Saline | 99 | 1.0 | 0.0 | 0.0 |
| 833748 | 93 | 2.3 | 0.5 | 3.8 |
| 833762 | 57 | 13.5 | 3.0 | 26.5 |
| 833767 | 62 | 21.3 | 0.0 | 17.0 |
| 833813 | 68 | 14.8 | 1.3 | 16.0 |
| 833882 | 70 | 24.3 | 0.5 | 5.5 |
| 833886 | 90 | 9.0 | 0.0 | 1.3 |
| 833887 | 87 | 8.8 | 0.0 | 4.3 |
| 833904 | 81 | 15.5 | 0.8 | 3.3 |
| 833965 | 88 | 8.3 | 0.8 | 3.0 |
| 833973 | 70 | 24.5 | 0.0 | 5.5 |
| 854255 | 77 | 15.5 | 0.0 | 7.8 |
| 854459 | 86 | 6.5 | 0.0 | 8.0 |
| 854471 | 72 | 16.3 | 1.0 | 10.8 |
| 854545 | 86* | 7.7* | 2.0* | 4.7* |

### Bronchoalveolar Lavage (BAL) Cytokine Profile

[0673] To evaluate the effect of modified oligonucleotides on lung function, levels of Interleukin-10 (IL-10), Interleukin-6 (IL-6), monocyte chemotactic protein (MCP)-1/CCL2 and macrophage inflammatory protein (MIP)1β/CCL4 in the bronchoalveolar lavage fluid (BAL) were measured. BAL fluid was analyzed with MULTI_SPOT 96-well 4 spot prototype mouse 4-plex from MSD.

[0674] The results are presented in the table below. Modified oligonucleotides that caused changes in the levels of any of the BAL cytokines outside the expected range for modified oligonucleotides were excluded in further studies.

TABLE 59
Cytokine profile in BAL

| Compound | IL-10 | IL-6 | CCL2 | CCL4 |
|---|---|---|---|---|
| Number | (pg/ml) | (pg/ml) | (pg/ml) | (pg/ml) |
| saline | 0.5 | 4.8 | 0 | 2 |
| 801727 | 0.5 | 10.3 | 104 | 387 |
| 801919 | 0.4 | 4.2 | 11 | 58 |
| 802032 | 0.4 | 4.7 | 106 | 245 |
| 833000 | 3.3 | 11.3 | 33 | 178 |
| 833241 | 1.6 | 53.8 | 439 | 1703 |
| 833243 | 0.9 | 6.0 | 33 | 159 |
| 833401 | 0.6 | 3.0 | 26 | 69 |
| 833486 | 1.1 | 5.9 | 363 | 2330 |
| 833561 | 0.4 | 4.9 | 43 | 107 |
| 833580 | 0.6 | 6.0 | 82 | 366 |
| 833581 | 0.2 | 3.2 | 4 | 36 |
| 833631 | 0.6 | 3.4 | 22 | 70 |
| 833635 | 0.5 | 2.6 | 10 | 69 |
| 833699 | 1.0 | 25.7 | 130 | 631 |
| 833711 | 1.7 | 2.9 | 7 | 25 |
| 833741 | 0.6 | 3.5 | 6 | 45 |

### Study 2

[0675] Groups of 7-to-8-week-old male CD-1 mice were dosed orotracheally once a week for six weeks (for a total of 6 treatments) with 20 mg/kg of modified oligonucleotides. One group of male CD-1 mice was treated with saline. Mice were euthanized 48 hours following the final administration.

[0676] Body weights of CD-1 mice were measured at days 1 and 37, and the average body weight for each group is presented in the table below. Modified oligonucleotides that caused any changes in organ weights outside the expected range for modified oligonucleotides were excluded from further studies.

TABLE 62
Cytokine profile in BAL

| Compound | IL-10 | IL-6 | CCL2 | CCL4 |
|---|---|---|---|---|
| No. | (pg/ml) | (pg/ml) | (pg/ml) | (pg/ml) |
| Saline | 0.5 | 0.9 | 1 | 20 |
| 833748 | 0.2 | 2.2 | 2 | 32 |
| 833762 | 2.0 | 26.4 | 3390 | 1195 |
| 833767 | 0.1 | 3.3 | 11 | 90 |
| 833813 | 5.6 | 31.8 | 760 | 2057 |
| 833882 | 0.7 | 9.8 | 111 | 297 |
| 833886 | 0.7 | 22.4 | 363 | 200 |
| 833887 | 0.5 | 4.8 | 141 | 270 |
| 833904 | 1.2 | 13.7 | 829 | 1919 |
| 833965 | 0.4 | 4.8 | 44 | 299 |
| 833973 | 3.5 | 17.3 | 195 | 1034 |
| 854255 | 0.9 | 9.5 | 397 | 426 |
| 854459 | 0.9 | 14.5 | 153 | 505 |
| 854471 | 4.3 | 53.1 | 987 | 3421 |
| 854545 | 0.2 | 2.9 | 59 | 108 |

### Study 3

[0677] Groups of 7-to-8-week-old male CD-1 mice were dosed orotracheally once a week for six weeks (for a total of 6 treatments) with 20 mg/kg of modified oligonucleotides. One group of male CD-1 mice was treated with saline. Mice were euthanized 72 hours following the final administration.

[0678] Body weights of CD-1 mice were measured at days 1 and 36, and the average body weight for each group is presented in the table below. Modified oligonucleotides that caused any changes in organ weights outside the expected range for modified oligonucleotides were excluded from further studies.

TABLE 63
Body weights (in grams)

| | |
|---|---|
| Compound | Body Weight (g) |

| No. | Day 1 | Day 36 |
|---|---|---|
| Saline | 28 | 35 |
| 854302 | 28 | 33 |
| 936069 | 27 | 34 |
| 936088 | 28 | 35 |
| 936096 | 28 | 33 |
| 936100 | 29 | 34 |
| 936104 | 28 | 35 |
| 936110 | 28 | 34 |
| 936142 | 28 | 36 |
| 936158 | 30 | 36 |

### Bronchoalveolar Lavage (BAL) Cellular Profile

[0679] To evaluate the effect of modified oligonucleotides on lung function, levels of macrophages (MAC), neutrophils (NEU), lymphocytes (LYM), and eosinophils (EOS) in the bronchoalveolar lavage fluid (BAL) were measured. Mouse lungs were lavaged two times with 0.5 ml of PBS containing 1% BSA (Sigma-Aldrich). BAL fluid samples were centrifuged to generate a cell pellet and a cell-free supernatant. The recovered airway cells were resuspended in PBS with 1% BSA, and a cytospin was performed. Cells were stained with Diff-Quik stain (VWR). Data are presented as the percent of cells present in the total recovered BAL cell population.

[0680] Modified oligonucleotides that caused changes in the levels of any of the BAL markers outside the expected range for modified oligonucleotides were excluded in further studies. In some cases, where less than 4 samples were available in a group, the values are marked with an asterisk (*).

TABLE 64
Cellular profile in BAL

| Compound No. | MAC (%) | LYM (%) | EOS (%) | NEU (%) |
|---|---|---|---|---|
| saline | 97 | 2.5 | 0.0 | 0.5 |
| 854302 | 97 | 2.0 | 0.0 | 1.3 |
| 936069 | 90 | 5.3 | 0.0 | 5.3 |
| 936088 | 79 | 2.8 | 0.0 | 18.0 |
| 936096 | 96 | 4.3 | 0.0 | 0.3 |
| 936100 | 69 | 16.0 | 0.0 | 15.5 |
| 936104 | 91 | 5.5 | 0.0 | 3.5 |
| 936110 | 85 | 12.8 | 0.0 | 2.5 |
| 936142 | 89 | 7.8 | 0.0 | 3.5 |
| 936158 | 96 | 2.0 | 0.0 | 2.0 |

### Bronchoalveolar Lavage (BAL) Cytokine Profile

[0681] To evaluate the effect of modified oligonucleotides on lung function, levels of Interleukin-10 (IL-10), Interleukin-6 (IL-6), monocyte chemotactic protein (MCP)-1/CCL2 and macrophage inflammatory protein (MIP)1β/CCL4 in the bronchoalveolar lavage fluid (BAL) were measured. BAL fluid was analyzed with MULTI_SPOT 96-well 4 spot prototype mouse 4-plex from MSD.

[0682] The results are presented in the table below. Modified oligonucleotides that caused changes in the levels of any of the BAL cytokines outside the expected range for modified oligonucleotides were excluded in further studies.

TABLE 65
Cytokine profile in BAL

| Compound | IL-10 | IL-6 | CCL2 | CCL4 |
|---|---|---|---|---|
| Number | (pg/ml) | (pg/ml) | (pg/ml) | (pg/ml) |
| Saline | N.D. | 0.4* | 1 | 21* |
| 854302 | 1.1* | 2.0 | 15 | 147 |
| 936069 | 0.6 | 0.5* | 12 | 79 |
| 936088 | 0.4 | 1.9 | 30 | 379 |
| 936096 | 1.2* | 1.2* | 28* | 71* |
| 936100 | 0.9 | 6.5 | 544 | 1078 |
| 936104 | 1.8 | 1.9* | 81 | 504 |
| 936110 | 0.5 | 1.2* | 15* | 75* |
| 936142 | 1.0* | 0.5* | 13* | 126* |
| 936158 | 0.4* | 0.9 | 3 | 72* |

### Study 4

[0683] Groups of 7-to-8-week-old male CD-1 mice were dosed orotracheally once a week for six weeks (for a total of 6 treatments) with 20 mg/kg of modified oligonucleotides. One group of male CD-1 mice was treated with saline. Mice were euthanized 72 hours following the final administration.

[0684] Body weights of CD-1 mice were measured at days 1 and 36, and the average body weight for each group is presented in the table below. Modified oligonucleotides that caused any changes in organ weights outside the expected range for modified oligonucleotides were excluded from further studies.

TABLE 66
Body weights (in grams)

| | |
|---|---|
| Compound | Body Weight (g) |

| No. | Day 1 | Day 36 |
|---|---|---|
| Saline | 32 | 39 |
| 936169 | 33 | 40 |
| 936198 | 32 | 41 |
| 936199 | 33 | 42 |
| 936208 | 33 | 42 |
| 936214 | 33 | 39 |
| 936218 | 34 | 40 |
| 936268 | 32 | 41 |
| 936279 | 32 | 39 |
| 936415 | 32 | 39 |

### Bronchoalveolar Lavage (BAL) Cellular Profile

[0685] To evaluate the effect of modified oligonucleotides on lung function, levels of macrophages (MAC), neutrophils (NEU), lymphocytes (LYM), and eosinophils (EOS) in the bronchoalveolar lavage fluid (BAL) were measured. Mouse lungs were lavaged two times with 0.5 ml of PBS containing 1% BSA (Sigma-Aldrich). BAL fluid samples were centrifuged to generate a cell pellet and a cell-free supernatant. The recovered airway cells were resuspended in PBS with 1% BSA, and a cytospin was performed. Cells were stained with Diff-Quik stain (VWR). Data are presented as the percent of cells present in the total recovered BAL cell population.

[0686] Modified oligonucleotides that caused changes in the levels of any of the BAL markers outside the expected range for modified oligonucleotides were excluded in further studies. In some cases, where less than 4 samples were available in a group, the values are marked with an asterisk (*).

TABLE 67
Cellular profile in BAL

| | |
|---|---|
| ION | BAL |

| No. | MAC (%) | LYM (%) | EOS (%) | NEU (%) |
|---|---|---|---|---|
| saline | 99 | 1.0 | 0.0 | 0.0 |
| 936169 | 89 | 6.3 | 0.0 | 5.5 |
| 936198 | 78 | 7.0 | 0.0 | 15.5 |
| 936199 | 59 | 25.3 | 0.0 | 16.3 |
| 936208 | 70 | 7.5 | 0.0 | 23.0 |
| 936214 | 71 | 3.3 | 0.0 | 26.3 |
| 936218 | 90 | 3.0 | 0.0 | 7.3 |
| 936268 | 91 | 4.8 | 0.0 | 4.5 |
| 936279 | 81 | 15.0 | 0.0 | 3.8 |
| 936415 | 43 | 9.5 | 0.8 | 46.5 |

### Bronchoalveolar Lavage (BAL) Cytokine Profile

[0687] To evaluate the effect of modified oligonucleotides on lung function, levels of Interleukin-10 (IL-10), Interleukin-6 (IL-6), monocyte chemotactic protein (MCP)-1/CCL2 and macrophage inflammatory protein (MIP)1β/CCL4 in the bronchoalveolar lavage fluid (BAL) were measured. BAL fluid was analyzed with MULTI_SPOT 96-well 4 spot prototype mouse 4-plex from MSD.

[0688] The results are presented in the table below. Modified oligonucleotides that caused changes in the levels of any of the BAL cytokines outside the expected range for modified oligonucleotides were excluded in further studies.

TABLE 68
Cytokine profile in BAL

Cytokines

| ION | IL-10 | IL-6 | CCL2 | CCL4 |
|---|---|---|---|---|
| No. | (pg/ml) | (pg/ml) | (pg/ml) | (pg/ml) |
| saline | 0.6* | 0.3* | 1* | 8* |
| 936169 | 0.5* | 1.4 | 20 | 141 |
| 936198 | 0.1* | 0.9 | 38 | 367 |
| 936199 | 14.8 | 21.6 | 660 | 2362 |
| 936208 | 0.8* | 0.8 | 25 | 212 |
| 936214 | 0.4* | 1.2 | 20 | 170 |
| 936218 | 0.7* | 9.8 | 33 | 170 |
| 936268 | 0.4* | 1.1* | 12 | 141 |
| 936279 | 1.0* | 3.3* | 38 | 203 |
| 936415 | 0.7 | 21.3 | 53 | 842 |

### Example 6: Activity of Modified Oligonucleotides Targeting Human SPDEF in Human Primary Bronchial Epithelial Cells (HBEs)

[0689] HBEs were obtained from Epithelix (Cat #EP61SA) and grown per manufacturer instructions.

### Study 1

[0690] HBEs were plated at 80,000 cells/well in a 96-well transwell plate, and an air-liquid interface (ALI) was established by differentiation for 5 weeks. Post establishment of ALI, the cells were treated with modified oligonucleotide at the concentrations indicated in the table below by free uptake at the basolateral surface. 72 hours post treatment, total RNA was isolated from the cells and SPDEF RNA levels were measured by quantitative real-time RTPCR. Human SPDEF primer probe set RTS35575 (forward sequence AAGTGCTCAAGGACATCGAG, designated herein as SEQ ID NO: 9; reverse sequence CGGTATTGGTGCTCTGTCC, designated herein as SEQ ID NO: 10; probe sequence TCCATGGGATCTGCGGTGATGTT, designated herein as SEQ ID NO: 11) was used to measure RNA levels as described above. SPDEF RNA levels were normalized to levels of cyclophilin A, measured by human primer probe set HTS3936 (forward sequence GCCATGGAGCGCTTTGG, designated herein as SEQ ID NO: 12; reverse sequence TCCACAGTCAGCAATGGTGATC, designated herein as SEQ ID NO: 13; probe sequence TCCAGGAATGGCAAGACCAGCAAGA, designated herein as SEQ ID NO: 14). Results are presented in the tables below as percent reduction of the amount of SPDEF RNA, relative to untreated control (UTC). The half maximal inhibitory concentration (IC₅₀) of each modified oligonucleotide is also presented. IC₅₀ was calculated using the log (inhibitor) vs response (three parameters) function in GraphPad Prism 7.01.

TABLE 69
Dose-dependent percent reduction of human SPDEF
RNA in HBEs by modified oligonucleotides

| Compound | SPDEF (% UTC) | | | |
|---|---|---|---|---|
| Number | 0.2 μM | 1 μM | 10 μM | IC₅₀ μM |
| 833561 | 21 | 10 | 0 | 0.06 |
| 833581 | 91 | 44 | 17 | 1.05 |
| 833631 | 40 | 13 | 3 | 0.14 |
| 833748 | 38 | 10 | 3 | 0.12 |
| 833886 | 27 | 6 | 1 | 0.07 |
| 936069 | 32 | 16 | 2 | 0.11 |
| 936096 | 17 | 4 | 1 | 0.04 |
| 936110 | 30 | 18 | 1 | 0.10 |
| 936218 | 53 | 8 | 1 | 0.19 |

### Study 2

[0691] HBEs were plated at 150,000 cells/well in a 24-well transwell plate, and an air-liquid interface (ALI) was established by differentiation for 5 weeks. Post establishment of ALI, the cells were treated with modified oligonucleotide at the concentrations indicated in the table below by free uptake at the basolateral surface. 72 hours post treatment, total RNA was isolated from the cells and SPDEF RNA levels were measured by quantitative real-time RTPCR. Human SPDEF primer probe set RTS35575 was used to measure RNA levels as described above. SPDEF RNA levels were normalized to cyclophilin A, as measured by human primer probe set HTS3936. Results are presented in the tables below as percent reduction of the amount of SPDEF RNA, relative to untreated control (UTC). The half maximal inhibitory concentration (IC₅₀) of each modified oligonucleotide is also presented. IC₅₀ was calculated using the log (inhibitor) vs response (three parameters) function in GraphPad Prism 7.01.

TABLE 70
Dose-dependent percent reduction of human SPDEF
RNA in HBEs by modified oligonucleotides

| Compound | SPDEF (% UTC) | | | | |
|---|---|---|---|---|---|
| Number | 0.01 μM | 0.1 μM | 1 μM | 10 μM | IC₅₀ μM |
| 833561 | 112 | 67 | 18 | 7 | 0.23 |
| 833741 | 102 | 78 | 31 | 12 | 0.44 |
| 833748 | 118 | 82 | 36 | 11 | 0.58 |
| 936110 | 151 | 110 | 26 | 10 | 0.68 |
| 936142 | 94 | 54 | 19 | 4 | 0.14 |
| 936158 | 89 | 78 | 39 | 13 | 0.58 |

[0692] In addition, RNA levels of airway secretory mucins MUC5AC and MUC5B were measured in the samples. SPDEF (sterile a-motif pointed domain epithelial specific transcription factor) is a known regulator of MUC5AC and MUC5B expression. Human MUC5AC primer probe set (ThermoFisher Scientific 4453320) and human MUC5B primer probe set (ThermoFisher Scientific 4448892) were used to measure MUC5A and MUC5B RNA levels as described above. RNA levels were normalized to cyclophilin A, as measured by human primer probe set HTS3936.

[0693] Knockdown of SPDEF led to a significant knockdown of MUC5AC as well as MUC5B RNA.

TABLE 71
Dose-dependent percent reduction of MUC5A/B RNA
in HBEs by modified oligonucleotides

| | MUC5AC | | | | | MUC5B | | | | |
|---|---|---|---|---|---|---|---|---|---|---|
| | (% UTC) | | | | | (% UTC) | | | | |
| Compound | 0.01 | 0.1 | 1 | 10 | IC₅₀ | 0.01 | 0.1 | 1 | 10 | IC₅₀ |
| Number | μM | μM | μM | μM | μM | μM | μM | μM | μM | μM |
| 833561 | 98 | 30 | 11 | 5 | 0.06 | 92 | 134 | 144 | 43 | 13.32 |
| 833741 | 56 | 42 | 17 | 4 | 0.18 | 85 | 87 | 51 | 54 | 4.50 |
| 833748 | 87 | 90 | 22 | 8 | 0.31 | 65 | 105 | 115 | 59 | 17.59 |
| 936110 | 119 | 60 | 20 | 6 | 0.15 | 68 | 93 | 94 | 60 | 14.60 |
| 936142 | 76 | 33 | 8 | 5 | 0.06 | 46 | 153 | 126 | 58 | 18.87 |
| 936158 | 58 | 47 | 21 | 6 | 0.06 | 99 | 98 | 99 | 77 | 33.54 |

### Study 3

[0694] HBEs were plated at 150,000 cells/well in a 24-well transwell plate, and an air-liquid interface (ALI) was established by differentiation for 5 weeks. Post establishment of ALI, the cells were treated with modified oligonucleotide at the concentrations indicated in the table below by free uptake at the basolateral surface. 72 hours post treatment, total RNA was isolated from the cells and SPDEF RNA levels were measured by quantitative real-time RTPCR. Human SPDEF primer probe set RTS35575 was used to measure RNA levels as described above. SPDEF RNA levels were normalized to cyclophilin A levels, as measured by human primer probe set HTS3936. Results are presented in the tables below as percent reduction of the amount of SPDEF RNA, relative to untreated control (UTC). The half maximal inhibitory concentration (IC₅₀) of each modified oligonucleotide is also presented. IC₅₀ was calculated using the log (inhibitor) vs response (three parameters) function in GraphPad Prism 7.01.

TABLE 72
Dose-dependent percent reduction of human SPDEF
RNA in HBEs by modified oligonucleotides

| Compound | SPDEF (% UTC) | | | |
|---|---|---|---|---|
| Number | 1 μM | 3 μM | 10 μM | IC₅₀ μM |
| 833741 | 55 | 24 | 17 | 1.20 |
| 833748 | 29 | 18 | 5 | 0.46 |
| 833965 | 58 | 42 | 27 | 1.99 |
| 854302 | 24 | 12 | 7 | 0.34 |
| 854459 | 55 | 33 | 16 | 1.38 |
| 854545 | 30 | 15 | 7 | 0.46 |
| 936142 | 37 | 21 | 8 | 0.66 |
| 936158 | 56 | 25 | 11 | 1.17 |

### Study 4

[0695] HBEs were plated at 500,000 cells/well in a 6 well transwell plate, and an air-liquid interface (ALI) was established by differentiation for 5 weeks. Post establishment of ALI, the cells were treated with modified oligonucleotide at the concentrations indicated in the table below by free uptake at the basolateral surface. 72 hours post treatment, total RNA was isolated from the cells and SPDEF RNA levels were measured by quantitative real-time RTPCR. Human SPDEF primer probe set RTS35575 was used to measure RNA levels as described above. SPDEF RNA levels were normalized to cyclophilin A levels, as measured by human primer probe set HTS3936. Results are presented in the tables below as percent reduction of the amount of SPDEF RNA, relative to untreated control (UTC).

[0696] In addition, RNA levels of airway secretory mucins MUCSAC and MUCSB were measured in the samples. Human MUCSAC primer probe set (ThermoFisher Scientific 4453320) and human MUCSB primer probe set (ThermoFisher Scientific 4448892) were used to measure MUCSAC and MUCSB RNA levels as described above. RNA levels were normalized to cyclophilin A, as measured by human primer probe set HTS3936. Knockdown of SPDEF led to significant knockdown of MUCSAC, as well as of MUCB RNA.

TABLE 73
Reduction of human SPDEF, MUC5AC, and MUC5B RNA
in HBEs by modified oligonucleotides

| | | |
|---|---|---|
| SPDEF | MUC5AC | MUC5B |
| (% UTC) | (% UTC) | (% UTC) |

| Compound | 2 | 10 | 2 | 10 | 2 | 10 |
|---|---|---|---|---|---|---|
| Number | μM | μM | μM | μM | μM | μM |
| 854302 | 4 | 0 | 31 | 13 | 45 | 37 |
| 936158 | 30 | 12 | 82 | 35 | 79 | 51 |

### Example 7: Tolerability of Modified Oligonucleotides Targeting Human SPDEF in Sprague-Dawley Rats

[0697] Sprague-Dawley rats are a multipurpose model used for safety and efficacy evaluations. The rats were treated with Ionis modified oligonucleotides from the studies described in the Examples above and evaluated for changes in the levels of various plasma chemistry markers.

### Study 1

[0698] Male Sprague-Dawley rats were maintained on a 12-hour light/dark cycle and fed ad libitum with Purina normal rat chow. Groups of 4 Sprague-Dawley rats each were weekly injected subcutaneously with 50 mg/kg of Ionis oligonucleotide for 6 weeks (total 6 doses). The rats were euthanized; and organs, urine and plasma were harvested for further analysis 3 days after the last dose.

### Plasma Chemistry Markers

[0699] To evaluate the effect of Ionis oligonucleotides on hepatic function, plasma levels of transaminases were measured using an automated clinical chemistry analyzer (Hitachi Olympus AU400c, Melville, N.Y.). Plasma levels of ALT (alanine transaminase) and AST (aspartate transaminase) were measured and the results are presented in the table below expressed in IU/L. Plasma levels of total bilirubin (TBIL), creatinine (CREA), albumin (ALB), and Blood Urea Nitrogen (BUN) were also measured using the same clinical chemistry analyzer and the results are also presented in the table below. Ionis modified oligonucleotides that caused changes in the levels of any markers of liver function outside the expected range for modified oligonucleotides were excluded in further studies. In some cases, where less than 4 samples were available in a group, the compounds are marked with an asterisk (*).

TABLE 74
Plasma chemistry markers in Sprague-Dawley rats

| Compound | ALT | AST | BUN | CREA | ALB | TBIL |
|---|---|---|---|---|---|---|
| No. | (IU/L) | (IU/L) | (mg/dL) | (mg/dL) | (g/dL) | (mg/dL) |
| Saline | 43 | 71 | 19 | 0.2 | 3.1 | 0.2 |
| 801919 | 52 | 83 | 36 | 0.3 | 2.0 | 0.2 |
| 833401 | 216 | 311 | 24 | 0.4 | 4.0 | 0.8 |
| 833561 | 43 | 70 | 22 | 0.3 | 3.6 | 0.2 |
| 833581 | 66 | 67 | 23 | 0.3 | 3.1 | 0.2 |
| 833631 | 76 | 133 | 23 | 0.3 | 2.6 | 0.3 |
| 833741* | 65 | 85 | 25 | 0.3 | 3.5 | 0.2 |
| 833748 | 37 | 55 | 20 | 0.3 | 3.3 | 0.2 |
| 833767 | 40 | 64 | 22 | 0.3 | 3.7 | 0.1 |
| 833886 | 41 | 81 | 34 | 0.5 | 3.2 | 0.1 |
| 833887 | 31 | 54 | 44 | 0.5 | 2.1 | 0.1 |
| 833965 | 44 | 79 | 20 | 0.3 | 3.3 | 0.2 |
| 854459 | 84 | 118 | 22 | 0.4 | 3.0 | 0.2 |
| 854545 | 34 | 76 | 18 | 0.3 | 3.2 | 0.2 |

[0700] Blood obtained from rat groups at week 6 were sent to IDEXX BioResearch for measurement of blood cell counts. Counts taken include red blood cell (RBC) count, white blood cell (WBC) count, hemoglobin (HGB), hematocrit (HCT), Mean corpuscular volume (MCV), mean corpuscular hemoglobin (MCH), mean corpuscular hemoglobin concentration (MCHC), and individual white blood cell counts, such as that of monocytes (MON), neutrophils (NEU), lymphocytes (LYM), and platelets (PLT). The results are presented in the tables below. Ionis oligonucleotides that caused changes in the blood cell count outside the expected range for modified oligonucleotides were excluded in further studies.

TABLE 75
Blood Cell Count in Sprague-Dawley Rats

| Compound | WBC | RBC | HGB | HCT | MCV | MCH | MCHC | NEU | LYM | MON | PLT |
|---|---|---|---|---|---|---|---|---|---|---|---|
| No. | (/nL) | (/pL) | (g/dL) | (%) | (fL) | (pg) | (%) | (%) | (%) | (%) | (/nL) |
| Saline | 10 | 8 | 15 | 43 | 53 | 18 | 35 | 12 | 81 | 5 | 892 |
| 801919 | 31 | 6 | 11 | 33 | 55 | 18 | 33 | 7 | 85 | 8 | 901 |
| 833401 | 14 | 8 | 13 | 37 | 47 | 17 | 36 | 17 | 74 | 8 | 1477 |
| 833561 | 9 | 9 | 15 | 43 | 49 | 18 | 36 | 10 | 84 | 6 | 853 |
| 833581 | 12 | 8 | 15 | 41 | 51 | 18 | 35 | 16 | 77 | 6 | 678 |
| 833631 | 14 | 8 | 14 | 40 | 50 | 17 | 35 | 12 | 78 | 10 | 969 |
| 833741* | 15 | 8 | 15 | 43 | 52 | 18 | 35 | 13 | 82 | 5 | 855 |
| 833748 | 11 | 8 | 15 | 42 | 50 | 18 | 35 | 8 | 88 | 4 | 869 |
| 833767 | 16 | 8 | 15 | 42 | 52 | 18 | 35 | 11 | 84 | 5 | 1043 |
| 833886 | 12 | 8 | 14 | 39 | 49 | 17 | 35 | 18 | 74 | 7 | 848 |
| 833887 | 18 | 8 | 13 | 39 | 51 | 17 | 34 | 9 | 87 | 4 | 787 |
| 833965 | 15 | 7 | 13 | 38 | 51 | 17 | 34 | 12 | 80 | 7 | 699 |
| 854459 | 10 | 8 | 13 | 37 | 48 | 17 | 36 | 4 | 88 | 7 | 594 |
| 854545 | 14 | 8 | 15 | 43 | 51 | 18 | 35 | 9 | 85 | 5 | 739 |

[0701] To evaluate the effect of Ionis oligonucleotides on kidney function, urinary levels of micro total protein (MTP) and creatinine were measured using an automated clinical chemistry analyzer (Hitachi Olympus AU400c, Melville, N.Y.). The ratios of MTP to creatinine (MTP/C ratio) are presented in the table below. Ionis oligonucleotides that caused changes in the levels of the ratio outside the expected range for modified oligonucleotides were excluded in further studies.

TABLE 76
MTP to creatinine ratio in Sprague-Dawley rats

| Compound No. | MTP/C Ratio |
|---|---|
| Saline | 1.8 |
| 801919 | 9.2 |
| 833401 | 7.1 |
| 833561 | 3.8 |
| 833581 | 5.0 |
| 833631 | 4.2 |
| 833741* | 4.9 |
| 833748 | 5.0 |
| 833767 | 3.4 |
| 833886 | 5.8 |
| 833887 | 11.1 |
| 833965 | 4.2 |
| 854459 | 1.5 |
| 854545 | 3.5 |

[0702] Body weights of rats were measured at days 1 and 40, and the average body weight for each group is presented in the table below. Liver, spleen and kidney weights were measured at the end of the study, and are presented in the table below. Ionis oligonucleotides that caused any changes in organ weights outside the expected range for modified oligonucleotides were excluded from further studies.

TABLE 77
Body and organ weights (g)

| Compound | Body Weight (g) | | Liver | Kidney | Spleen |
|---|---|---|---|---|---|
| No. | Day 1 | Day 40 | Weight (g) | Weight (g) | Weight (g) |
| Saline | 267 | 460 | 17 | 3.7 | 0.9 |
| 801919 | 248 | 310 | 16 | 3.9 | 2.3 |
| 833401 | 256 | 370 | 21 | 3.4 | 1.5 |
| 833561 | 256 | 360 | 13 | 3.1 | 1.1 |
| 833581 | 251 | 399 | 15 | 3.4 | 1.1 |
| 833631 | 253 | 397 | 16 | 3.4 | 1.3 |
| 833741 | 254 | 376 | 15 | 3.4 | 1.3 |
| 833748 | 261 | 412 | 16 | 3.2 | 1.2 |
| 833767 | 260 | 418 | 18 | 3.3 | 1.0 |
| 833886 | 256 | 371 | 20 | 3.3 | 1.8 |
| 833887 | 250 | 334 | 14 | 3.8 | 1.0 |
| 833965 | 253 | 427 | 17 | 3.3 | 1.3 |
| 854459 | 247 | 370 | 14 | 3.5 | 1.9 |
| 854545 | 254 | 394 | 14 | 3.2 | 1.1 |

### Study 2

[0703] Male Sprague-Dawley rats were maintained on a 12-hour light/dark cycle and fed ad libitum with Purina normal rat chow. Groups of 4 Sprague-Dawley rats each were weekly injected subcutaneously with 50 mg/kg of Ionis oligonucleotide for 6 weeks (total 6 doses). The rats were euthanized; and organs, urine and plasma were harvested for further analysis 3 days after the last dose.

### Plasma Chemistry Markers

[0704] To evaluate the effect of Ionis oligonucleotides on hepatic function, plasma levels of transaminases were measured using an automated clinical chemistry analyzer (Hitachi Olympus AU400c, Melville, N.Y.). Plasma levels of ALT (alanine transaminase) and AST (aspartate transaminase) were measured and the results are presented in the Table below expressed in IU/L. Plasma levels of total bilirubin (TBIL), creatinine (CREA), albumin (ALB), and Blood Urea Nitrogen (BUN) were also measured using the same clinical chemistry analyzer and the results are also presented in the Table below. Ionis modified oligonucleotides that caused changes in the levels of any markers of liver function outside the expected range for modified oligonucleotides were excluded in further studies.

TABLE 78
Plasma chemistry markers in Sprague-Dawley rats

| Compound | ALT | AST | BUN | ALB | CREA | TBIL |
|---|---|---|---|---|---|---|
| No. | (IU/L) | (IU/L) | (mg/dL) | (g/dL) | (mg/dL) | (mg/dL) |
| Saline | 39 | 59 | 17 | 3.2 | 0.2 | 0.2 |
| 854302 | 196 | 293 | 24 | 3.0 | 0.4 | 0.7 |
| 936069 | 1259 | 702 | 21 | 2.9 | 0.4 | 1.6 |
| 936096 | 38 | 70 | 22 | 3.2 | 0.4 | 0.2 |
| 936110 | 82 | 171 | 21 | 2.8 | 0.4 | 0.3 |
| 936142 | 36 | 69 | 19 | 3.2 | 0.3 | 0.1 |
| 936158 | 35 | 85 | 19 | 3.4 | 0.3 | 0.1 |
| 936169 | 42 | 70 | 19 | 3.1 | 0.3 | 0.1 |
| 936218 | 71 | 87 | 17 | 3.1 | 0.3 | 0.2 |
| 936268 | 34 | 67 | 17 | 3.4 | 0.3 | 0.1 |

[0705] Blood obtained from rat groups at week 6 were sent to IDEXX BioResearch for measurement of blood cell counts. Counts taken include red blood cell (RBC) count, white blood cell (WBC) count, hemoglobin (HGB), hematocrit (HCT), Mean corpuscular volume (MCV), mean corpuscular hemoglobin (MCH), mean corpuscular hemoglobin concentration (MCHC), and individual white blood cell counts, such as that of monocytes (MON), neutrophils (NEU), lymphocytes (LYM), and platelets (PLT). The results are presented in the tables below. Ionis oligonucleotides that caused changes in the blood cell count outside the expected range for modified oligonucleotides were excluded in further studies.

TABLE 79
Blood Cell Count in Sprague-Dawley Rats

| Compound | WBC | RBC | HGB | HCT | MCV | MCH | MCHC | NEU | LYM | MON | PLT |
|---|---|---|---|---|---|---|---|---|---|---|---|
| No. | (/nL) | (/pL) | (g/dL) | (%) | (fL) | (pg) | (%) | (%) | (%) | (%) | (/nL) |
| Saline | 9 | 8 | 15 | 45 | 55 | 19 | 34 | 13 | 85 | 2 | 908 |
| 854302 | 10 | 9 | 16 | 47 | 51 | 18 | 35 | 16 | 77 | 6 | 717 |
| 936069 | 14 | 9 | 15 | 46 | 53 | 18 | 33 | 12 | 81 | 6 | 872 |
| 936096 | 12 | 8 | 15 | 45 | 54 | 18 | 33 | 11 | 85 | 4 | 703 |
| 936110 | 13 | 7 | 13 | 40 | 54 | 18 | 34 | 9 | 87 | 3 | 606 |
| 936142 | 7 | 9 | 15 | 47 | 54 | 18 | 33 | 11 | 85 | 3 | 906 |
| 936158 | 7 | 8 | 15 | 44 | 54 | 18 | 34 | 11 | 85 | 3 | 763 |
| 936169 | 13 | 8 | 15 | 43 | 51 | 17 | 35 | 12 | 83 | 5 | 744 |
| 936218 | 10 | 8 | 15 | 45 | 53 | 18 | 34 | 10 | 87 | 3 | 787 |
| 936268 | 9 | 8 | 14 | 44 | 54 | 18 | 33 | 12 | 85 | 2 | 902 |

[0706] To evaluate the effect of Ionis oligonucleotides on kidney function, urinary levels of micro total protein (MTP) and creatinine were measured using an automated clinical chemistry analyzer (Hitachi Olympus AU400c, Melville, N.Y.). The ratios of MTP to creatinine (MTP/C ratio) are presented in the table below. Ionis oligonucleotides that caused changes in the levels of the ratio outside the expected range for modified oligonucleotides were excluded in further studies.

TABLE 80
MTP to creatinine ratio in Sprague-Dawley rats

| Compound | | | | | | | | | | |
|---|---|---|---|---|---|---|---|---|---|---|
| No. | saline | 854302 | 936069 | 936096 | 936110 | 936142 | 936158 | 936169 | 936218 | 936268 |
| MTP/C | 0.9 | 2.9 | 4.4 | 5.9 | 4.9 | 4.7 | 3.9 | 4.6 | 4.5 | 3.3 |
| Ratio | | | | | | | | | | |

[0707] Body weights of rats were measured at days 1 and 38, and the average body weight for each group is presented in the table below. Liver, spleen and kidney weights were measured at the end of the study, and are presented in the table below. Ionis oligonucleotides that caused any changes in organ weights outside the expected range for modified oligonucleotides were excluded from further studies.

TABLE 81
Body and organ weights (g)

| Compound | Body Weight (g) | | Liver | Kidney | Spleen |
|---|---|---|---|---|---|
| No. | Day 1 | Day 38 | Weight (g) | Weight (g) | Weight (g) |
| Saline | 301 | 458 | 16 | 3.7 | 0.7 |
| 854302 | 294 | 310 | 12 | 2.8 | 1.1 |
| 936069 | 292 | 321 | 14 | 3.5 | 1.3 |
| 936096 | 294 | 396 | 16 | 3.2 | 1.5 |
| 936110 | 295 | 376 | 14 | 3.5 | 1.9 |
| 936142 | 291 | 389 | 15 | 3.5 | 0.9 |
| 936158 | 291 | 424 | 17 | 3.6 | 1.1 |
| 936169 | 300 | 395 | 14 | 3.5 | 1.3 |
| 936218 | 285 | 328 | 12 | 3.0 | 1.0 |
| 936268 | 346 | 464 | 18 | 4.1 | 1.1 |

### Example 8: Effect of Modified Oligonucleotides Targeting Human SPDEF in Cynomolgus Monkeys, Inhalation Study

[0708] Cynomolgus monkeys were treated with Ionis modified oligonucleotides selected from studies described in the Examples above. Modified oligonucleotide tolerability was evaluated.

[0709] Prior to the study, the monkeys were housed according to Ionis-Specific NHP Socialization and Enrichment Guidelines (Laboratory Animal Science (Life Science) Work Instruction LAS 001). Six groups of 2 male and 2 female (a total of 4 animals) randomly assigned cynomolgus monkeys each were treated with aerosolized Ionis oligonucleotide or aerosolized saline by inhalation via face mask for 20-27 minutes. Following loading doses of 12 mg/kg on days 1, 3, 5, and 7, the monkeys were dosed once per week (on days 14, 21, 28, 35, and 42) with 12 mg/kg of Ionis oligonucleotide. Saline treated animals served as the control group.

[0710] During the study period, the monkeys were observed twice daily for signs of illness or distress. Any animal in poor health or in a possible moribund condition was identified for further monitoring and possible euthanasia. Animals were fasted overnight prior to necropsy. Scheduled euthanasia of the animals was conducted on day 43 approximately 24 hours after the last dose by exsanguination while under deep anesthesia. The protocols described in the Example were approved by the Institutional Animal Care and Use Committee (IACUC). The study complied with all applicable sections of the Final Rules of the Animal Welfare Act regulations (9 CFR Parts 1, 2, and 3) and the Guide for the Care and Use of Laboratory Animals National Research Council, National Academy Press Washington, D.C. Copyright 2011.

[0711] To evaluate the effect of Ionis oligonucleotides on the overall health of the animals, body and organ weights were measured. Terminal body weight was measured prior to necropsy. Organ weights were measured as well, and all weight measurements are presented in the table below. The results indicate that effect of treatment with modified oligonucleotides on body and organ weights was within the expected range for modified oligonucleotides.

TABLE 82
Body and Organ weights

| | Body | | | | | | | |
|---|---|---|---|---|---|---|---|---|
| | Weight | | | | | | | |
| | (kg) | | | | | | | |
| Compound | Day | Heart | Kidney | Liver | Lung | Spleen | Thymus | Brain |
| No. | 43 | (g) | (g) | (g) | (g) | (g) | (g) | (g) |
| Saline | 3.1 | 9 | 13 | 66 | 22 | 4 | 3 | 68 |
| 833561 | 3.0 | 8 | 12 | 56 | 19 | 2 | 3 | 66 |
| 833741 | 3.1 | 9 | 13 | 65 | 21 | 3 | 3 | 68 |
| 833748 | 2.9 | 9 | 12 | 55 | 20 | 3 | 2 | 67 |
| 936142 | 3.0 | 9 | 13 | 60 | 21 | 3 | 4 | 65 |
| 936158 | 3.0 | 9 | 14 | 69 | 23 | 4 | 2 | 69 |

[0712] To evaluate the effect of Ionis oligonucleotides on hepatic and kidney function, blood samples were collected from all the study groups on day 43. Whole blood was mixed with clot activator to allow clot formation for at least 30 minutes at room temperature. Serum was separated by centrifugation within 2 hours of collection. Levels of various liver function markers were measured using a Roche Cobas c501 Clinical Chemistry System (Roche Diagnostics, Indianapolis, Ind.). Blood urea nitrogen (BUN), creatinine (CREA), total protein (TP), albumin (ALB), alanine aminotransferase (ALT), aspartate aminotransferase (AST), total bilirubin (TBIL) were measured and the results are presented in the table below. The results indicate that modified oligonucleotides had no effect on liver and kidney function outside the expected range for modified oligonucleotides. Specifically, treatment with ION 833561 was well tolerated in terms of the liver and kidney function in monkeys.

TABLE 83
Liver and kidney function markers in cynomolgus monkey plasma

| Compound | BUN | CREA | TP | ALB | ALT | AST | TBIL |
|---|---|---|---|---|---|---|---|
| No. | (mg/dL) | (mg/dL) | (g/dL) | (g/dL) | (IU/L) | (IU/L) | (mg/dL) |
| Saline | 15 | 0.7 | 6.3 | 3.9 | 52 | 67 | 0.16 |
| 833561 | 13 | 0.9 | 6.7 | 4.1 | 46 | 78 | 0.16 |
| 833741 | 12 | 0.8 | 6.7 | 4.2 | 72 | 62 | 0.16 |
| 833748 | 12 | 1.0 | 6.8 | 4.3 | 35 | 58 | 0.16 |
| 936142 | 16 | 0.9 | 6.3 | 3.9 | 63 | 120 | 0.19 |
| 936158 | 14 | 0.9 | 6.6 | 4.1 | 54 | 141 | 0.18 |

[0713] To evaluate any inflammatory effect of Ionis oligonucleotides in cynomolgus monkeys, blood samples were taken for analysis. On day 42 (pre-dose) and day 43, approximately 1.0 mL of blood was collected from each animal and put into tubes with K₃EDTA for serum separation. The samples were centrifuged at 2,000 g for 10 min within an hour of collection. Complement C3 and Activated Factor B (Bb) were measured using a Beckman Image 800 analyzer and a Quidel Bb Plus ELISA kit respectively. The results indicate that treatment with ION 835561 did not cause any inflammation in monkeys. Another marker of inflammation, C-Reactive Protein (CRP) was tested together with the clinical chemistry parameters tested for liver function above.

TABLE 84
Pro-inflammatory protein analysis in cynomolgus monkeys

| | Complement | | Activated Factor | | |
|---|---|---|---|---|---|
| | C3 (mg/dL) | | B (Bb) (mg/dL) | | |
| | day 42 | day 43 | day 42 | day 43 | CRP |
| Compound | (pre- | (24 hr post- | (pre- | (24 hr post- | day 43 |
| No. | dose) | dose) | dose) | dose) | (mg/dL) |
| Saline | 92 | 84 | 1.1 | 1.4 | 11 |
| 833561 | 92 | 90 | 1.1 | 1.6 | 10 |
| 833741 | 83 | 85 | 1.3 | 2.0 | 4 |
| 833748 | 101 | 96 | 1.2 | 1.9 | 8 |
| 936142 | 95 | 85 | 1.2 | 2.6 | 15 |
| 936158 | 85 | 75 | 1.3 | 1.8 | 10 |

[0714] To evaluate any effect of Ionis oligonucleotides in cynomolgus monkeys on hematologic parameters, blood samples of approximately 0.5 mL of blood was collected from each of the available study animals on day 43. The samples were collected in tubes containing K₃EDTA. Samples were analyzed for red blood cell (RBC) count, Hemoglobin (HGB), Hematocrit (HCT), Mean corpuscular volume (MCV), mean corpuscular hemoglobin (MCH), mean corpuscular hemoglobin concentration (MCHC), platelet count (PLT), white blood cells (WBC) count, monocyte count (MON), neutrophil count (NEU), lymphocyte count (LYM), eosinophil count (EOS), and basophil count (BAS) using an ADVIA2120 hematology analyzer (Siemens, USA).

[0715] The data indicate the oligonucleotides did not cause any changes in hematologic parameters outside the expected range for modified oligonucleotides at this dose. Specifically, treatment with ION 833561 was well tolerated in terms of the hematologic parameters of the monkeys.

TABLE 85
Hematology analysis in cynomolgus monkeys

| Compound | RBC | HGB | HCT | MCV | MCH | MCHC |
|---|---|---|---|---|---|---|
| No. | (\hat{ }6/μL) | (g/dL) | (%) | (fL) | (pg) | (g/dL) |
| Saline | 5 | 13 | 42 | 78 | 24 | 31 |
| 833561 | 5 | 13 | 42 | 78 | 24 | 31 |
| 833741 | 6 | 14 | 45 | 80 | 24 | 30 |
| 833748 | 6 | 13 | 44 | 80 | 24 | 30 |
| 936142 | 5 | 13 | 41 | 81 | 25 | 31 |
| 936158 | 5 | 13 | 41 | 80 | 24 | 30 |

TABLE 86
Hematology analysis in cynomolgus monkeys

| Compound | WBC | NEU | LYM | MON | EOS | BAS | PLT |
|---|---|---|---|---|---|---|---|
| No. | (\hat{ }3/μL) | (\hat{ }3/μL) | (\hat{ }3/μL) | (\hat{ }3/μL) | (\hat{ }3/μL) | (\hat{ }3/μL) | (\hat{ }3/μL) |
| Saline | 11 | 5 | 5 | 0.51 | 0.08 | 0.04 | 450 |
| 833561 | 10 | 4 | 5 | 0.51 | 0.07 | 0.04 | 442 |
| 833741 | 10 | 4 | 5 | 0.35 | 0.03 | 0.03 | 521 |
| 833748 | 10 | 4 | 6 | 0.59 | 0.07 | 0.04 | 367 |
| 936142 | 14 | 7 | 6 | 0.82 | 0.08 | 0.05 | 419 |
| 936158 | 12 | 6 | 5 | 0.55 | 0.05 | 0.05 | 369 |

### Pharmacokinetic Analysis

[0716] Accumulation of modified oligonucleotides in various organs were measured in tissues collected at necropsy. Mean plasma concentrations at 24 hours post the last dose for all SPDEF modified oligonucleotides was evaluated. 833561 showed tissue and plasma accumulation profiles that were typical for this class of compound.

TABLE 87
Mean SPDEF modified oligonucleotide
Tissue Concentration (μg/g)

| | | Mean Concentration |
|---|---|---|
| Compound No. | Organ | (μg/g) |
| 833561 | Kidney | 196 |
| | Liver | 32 |
| | Lung | 186 |
| | Tracheal bronchial Lymph Node | 101 |
| | Prostate | ^{¶}8 |
| 833741 | Kidney | 180 |
| | Liver | 38 |
| | Lung | 412 |
| | Tracheal bronchial Lymph Node | 237 |
| | Prostate | ^{†}1 |
| 833748 | Kidney | 195 |
| | Liver | 38 |
| | Lung | 340 |
| | Tracheal bronchial Lymph Node | 213 |
| | Prostate | ^{¶}1 |
| 936142 | Kidney | 221 |
| | Liver | 42 |
| | Lung | 349 |
| | Tracheal bronchial Lymph Node | 248 |
| | Prostate | ^{¶}2 |
| 936158 | Kidney | 144 |
| | Liver | 25 |
| | Lung | 340 |
| | Tracheal bronchial Lymph Node | 171 |
| | Prostate | ^{†}1 |

^{¶}refers to groups with only 2 samples available
^{†}refers to groups with only 1 sample available

TABLE 88
Mean SPDEF modified oligonucleotide Plasma Concentration

| Compound No. | Mean Plasma Concentration (μg/ml) |
|---|---|
| 833561 | 0.1 |
| 833741 | 0.2 |
| 833748 | 0.1 |
| 936142 | 0.1 |
| 936158 | 0.1 |

### Bronchoalveolar Lavage (BAL) Cellular Analysis

[0717] Lung lavage was performed after collection of whole lung weight. The two washes were pooled and centrifuged at 300×g for 10 minutes. The pellet was resuspended in PBS in 1% BSA and a cytospin was performed. The slides were fixed and stained with modified Wright's stain (Siemens) with a Hematek 3000 instrument. The slides were used to obtain a cell differential using a Nikon E400 microscope. Cell counts taken include macrophages (MAC), neutrophils (NEU), eosinophils (EOS), and lymphocytes (LYM).

TABLE 89
Cellular profile in BAL

| Compound No. | MAC (%) | LYM (%) | EOS (%) | NEU (%) |
|---|---|---|---|---|
| Saline | 85 | 10 | 0 | 5 |
| 833561 | 89 | 7 | 0 | 4 |
| 833741 | 92 | 4 | 0 | 4 |
| 833748 | 85 | 12 | 0 | 3 |
| 936142 | 82 | 17 | 0 | 2 |
| 936158 | 86* | 14* | 0* | 1* |

*Samples available from only 2 animals

### Bronchoalveolar Lavage (BAL) Cytokine Profile

[0718] To evaluate the effect of modified oligonucleotides on lung function, levels of Interleukin-10 (IL-10), Interleukin-6 (IL-6), monocyte chemotactic protein (MCP)-1/CCL2, macrophage inflammatory protein (MIP)1β/CCL4, MIP-la, MCP-4, MDC and IP-10 in the bronchoalveolar lavage fluid (BAL) were measured. Cytokines were measured with 2 NHP kits from Meso Scale Diagnostics, LLC: U-PLEX Chemokine combo 1 K15055K-1 and U-PLEX TH17 Combo 1 K15079K-1.

[0719] The results are presented in the table below. Modified oligonucleotides that caused changes in the levels of any of the BAL cytokines outside the expected range for modified oligonucleotides were excluded in further studies. In some cases, the level of cytokine was too low to be measured accurately and is annotated as N/A.

TABLE 90
Cytokine profile in BAL

| Compound | IL-10 | IL-6 | MCP-1 | MIP-1β | MIP-1α | MCP-4 | MDC | IP-10 |
|---|---|---|---|---|---|---|---|---|
| No. | (pg/ml) | (pg/ml) | (pg/ml) | (pg/ml) | (pg/ml) | (pg/ml) | (pg/ml) | (pg/ml) |
| Saline | 0.01 | 0.5 | 370 | 4 | 20 | 6 | 114 | 73 |
| 833561 | N/A | 1.0 | 1314 | 7 | 28 | 8 | 193 | 872 |
| 833741 | N/A | 1.0 | 1475 | 6 | 33 | 7 | 307 | 137 |
| 833748 | 0.01 | 0.9 | 972 | 9 | 33 | 5 | 194 | 189 |
| 936142 | N/A | 0.8 | 1217 | 24 | 79 | 5 | 308 | 153 |
| 936158 | N/A | 0.5 | 2376 | 8 | 32 | 8 | 549 | 605 |

### Example 9: Effect of Modified Oligonucleotides on Cynomolgus Monkey SPDEF RNA In Vitro, Multiple Doses

[0720] Modified oligonucleotides selected from the examples above were tested at various doses in 4MBr-5 cells. Cultured 4MBr-5 cells at a density of 30,000 cells per well were treated with modified oligonucleotide at various doses by electroporation, as specified in the tables below. The electroporated cells were plated into culture media containing 50 ng/mL of human IL-13 protein (R&D systems #213-ILB-005). After an incubation of approximately 24 hours, total RNA was isolated from the cells and SPDEF RNA levels were measured by quantitative real-time RTPCR. Cynomolgus SPDEF primer probe set Mf02917915_ml was used to measure RNA levels as described above. SPDEF RNA levels were normalized to total RNA content, as measured by RIBOGREEN®. Results are presented in the tables below as percent reduction of the amount of SPDEF RNA, relative to untreated control (UTC). The half maximal inhibitory concentration (IC₅₀) of each modified oligonucleotide is also presented. IC₅₀ was calculated using a linear regression on a log/linear plot of the data in Excel.

TABLE 91
Dose-dependent percent reduction of cynomolgus monkey
SPDEF RNA by modified oligonucleotides

| | Number of | | | | | | |
|---|---|---|---|---|---|---|---|
| | Mismatches | SPDEF (% UTC) | | | | | |
| Compound | to Cyno | 20000 | 5000 | 1300 | 300 | 100 | IC₅₀ |
| Number | RNA | nM | nM | nM | nM | nM | μM |
| 833561 | 0 | 14 | 8 | 18 | 44 | 60 | 0.1 |
| 833741 | 1 | 6 | 21 | 50 | 58 | 77 | 0.7 |
| 833748 | 1 | 8 | 41 | 64 | 67 | 89 | 1.6 |
| 936158 | 2 | 25 | 56 | 72 | 74 | 75 | 4.3 |
| 936142 | 1 | 54 | 69 | 75 | 55 | 73 | >20 |

### Example 10: Effect of a Modified Oligonucleotide Complementary to SPDEF in a Bleomycin Induced Pulmonary Fibrosis Model

[0721] A group of twelve 12-week old male C57BL/6 mice (Jackson Laboratory) were treated with Compound No. 652553, and a group of twenty 12-week old male C57BL/6 mice (Jackson Laboratory) were similarly treated with control Compound No. 549148.

[0722] Both Compound Nos. 652553 and 549148 are 3-10-3 cEt gapmers, wherein they have a central gap segment of ten 2′-β-D-deoxynucleosides, wherein the 5′ and 3′ wing segments each consist of three cEt modified nucleosides, wherein the internucleoside linkages throughout the modified oligonucleotides are phosphorothioate (P═S) linkages, and wherein all cytosine nucleobases throughout the modified oligonucleotides are 5-methylcytosines. Compound No. 652553 has a sequence (from 5′ to 3′) of GCTCATGTGTATCCCT (SEQ ID NO: 2285), and is designed to be complementary to the mouse SPDEF target sequence, designated herein as SEQ ID NO: 2286 (GENBANK Accession No. NM_013891.4) at Start site 1540 and Stop site 1555, wherein “Start site” indicates the 5′-most nucleoside of the target sequence to which the modified oligonucleotide is complementary, and “Stop site” indicates the 3′-most nucleoside of the target sequence to which the modified oligonucleotide is complementary. Compound No. 549148 is a control oligonucleotide with a sequence (from 5′ to 3′) of GGCTACTACGCCGTCA (SEQ ID NO: 2287), and is designed to not target mouse SPDEF or any known gene.

[0723] Following a total of 3 loading doses of 10 mg/kg of modified oligonucleotide administered orotracheally twice per week prior to Day 0, the mice were dosed orotracheally twice per week with 10 mg/kg/dose of modified oligonucleotide for a total of 6 doses. Mice were sacrificed on Day 18 (48 hours post final dose of modified oligonucleotide). Following the loading dose, the mice were also treated with 2.5 u/kg of Bleomycin (Savmart, catalog #NDC-0783-3154-01) on Day 0 and 1.5u/kg of Bleomycin on Day 14. As a control, one group of twenty-four 12-week old male C57BL/6 mice (Jackson Laboratory) were treated with 2.5u/kg of Bleomycin on Day 0 and 1.5u/kg of Bleomycin on Day 14, without any treatment with modified oligonucleotide. The treatment groups were compared to a group of eight 12-week old male C57BL/6 mice (Jackson Laboratory) that were naïve and were not treated with either modified oligonucleotide or Bleomycin.

### Body Weights and Survivals

[0724] Body weights of C57BL/6 mice were measured, and the average body weight for each group om Day 0 and Day 18 are presented in the table below. In addition, the number of animals at the Days 0 and 18 were counted and are presented in the table below.

TABLE 92
Body weights (in grams) and survivals

| | Body weight (g) | | number of animals | |
|---|---|---|---|---|
| Treatment | Day 0 | Day 18 | Day 0 | Day 18 |
| naïve | 29 | 29 | 8 | 8 |
| Bleomycin alone | 28 | 26 | 24 | 21 |
| Belomycin + 549148 | 29 | 28 | 20 | 18 |
| Bleomycin + 652553 | 28 | 26 | 12 | 12 |

### Lung Function

[0725] Lung function was measured on Day 17 using the Penh score obtained through unrestrained plethysmography. A higher Penh score indicates more lung constriction. The results, shown in the table below, indicate that pre-treatment with a modified oligonucleotide complementary to SPDEF prevented the decrease in lung function (or the increase in Penh score) observed in the bleomycin induced pulmonary fibrosis mouse model.

TABLE 93
Penh Scores

| Treatment | Penh Score |
|---|---|
| naïve | 0.8 |
| Bleomycin alone | 5.4 |
| Bleomycin + 549148 | 3.1 |
| Belomycin + 652553 | 1.0 |

### RNA Analysis

[0726] On Day 18, RNA was extracted from the lungs of the mice for quantitative real-time RTPCR analysis of SPDEF RNA expression. In addition to SPDEF RNA levels, the RNA expression levels of various mouse lung fibrosis genes, including MUC5b, MUC5ac, COL1A1, ACTA2, TIMP1, and OPN, was tested using quantitative real-time RTPCR. The primer-probe sets used to measure levels of RNA of mouse SPDEF, MUC5b, MUC5ac, COL1A, ACTA2, TIMP1, and OPN are listed in the table below.

TABLE 94
List of mouse primer-probe sets used for RNA analysis

| | primer- | | SEQ | | SEQ | | SEQ |
|---|---|---|---|---|---|---|---|
| Target | probe set | Forward | ID | | ID | | ID |
| RNA | name | primer | NO. | Reverse Primer | NO. | Probe | NO. |
| SPDEF | RTS4444 | GCGAGGTC | 2288 | GCCACTTCTG | 2289 | CTTCTGAACAT | 2290 |
| | | CTGAAAGA | | CACGTTACCA | | CACAGCAGAC | |
| | | TATTGAG | | | | CCTGGG | |
| MUC5b | RTS3745 | TGACTCCA | 2291 | AGGTGTAAGG | 2292 | CACCTTCATCC | 2293 |
| | | TATCCTCA | | CGCTCATGCT | | CACCTATCACT | |
| | | TCCACAAG | | | | GTCTTCCC | |
| MUC5ac | RTS942 | TCACGTGC | 2294 | TGCTATCATC | 2295 | CCAGCCTTGTG | 2296 |
| | | CCTGATAA | | CCTGTAGCAG | | GCCCATCC | |
| | | CCAA | | TAGTG | | | |
| COL1A1 | mcolla1 | TGGATTCC | 2297 | TCAGCTGGAT | 2298 | AAGCGAGGGC | 2299 |
| | | CGTTCGAG | | AGCGACATC | | TCCGACCCGA | |
| | | TACG | | | | | |
| ACTA2 | mActa2_LTS00192 | TGCCTCTA | 2300 | GCAGGAATG | 2301 | CGTTTTGTGGA | 2302 |
| | | GCACACAA | | ATTTGGAAAG | | TCAGCGCCTCC | |
| | | CTGTGA | | GAA | | A | |
| TIMP1 | LTS00190 | TCATGGAA | 2303 | GCGGCCCGTG | 2304 | CCCACAAGTC | 2305 |
| | | AGCCTCTG | | ATGAGA | | CCAGAACCGC | |
| | | TGGAT | | | | AGTG | |
| OPN | RTS3534 | TGGTGCCT | | GTTTCTTGCTT | 2307 | AAGCAGAATC | 2308 |
| | | GACCCATC | 2306 | AAAGTCATCC | | TCCTTGCGCCA | |
| | | TCA | | TTTTCTT | | CAGAA | |

[0727] The levels of SPDEF RNA expression are presented as percent SPDEF RNA, relative to naïve control (% control). The levels of MUC5b RNA expression are presented as percent MUC5b RNA relative to naïve control (% control). The levels of MUC5ac RNA expression are presented as percent MUC5ac RNA relative to naïve control (% control). The levels of COL1A1 RNA expression are presented as percent COL1A1 RNA relative to naïve control (% control). The levels of ACTA2 RNA expression are presented as percent ACTA2 RNA relative to naïve control (% control). The levels of TIMP1 RNA expression are presented as percent TIMP1 RNA relative to naïve control (% control). The levels of OPN RNA expression are presented as percent OPN RNA relative to naïve control (% control).

[0728] As presented in the table below, treatment with SPDEF modified oligonucleotide resulted in reduction of SPDEF RNA in comparison to the naïve control. In addition, treatment with SPDEF modified oligonucleotide resulted in significant reduction of RNA expression of fibrosis markers compared to animals treated with bleomycin alone and compared to Bleomycin+549148.

TABLE 95
Modified oligonucleotide mediated inhibition of SPDEF
RNA expression and fibrosis gene RNA expression

| | | Bleomycin | Belomycin + | Bleomycin + |
|---|---|---|---|---|
| Gene | Naïve | alone | 549148 | 652553 |
| SPDEF | 100 | 160 | 158 | 90 |
| MUC5b | 100 | 159 | 173 | 79 |
| MUC5ac | 100 | 215 | 127 | 98 |
| COL1A1 | 100 | 2279 | 1398 | 918 |
| ACTA2 | 100 | 387 | 304 | 277 |
| TIMP1 | 100 | 6409 | 5102 | 2136 |
| OPN | 100 | 4279 | 4281 | 1341 |

### Example 11: Effect of a Modified Oligonucleotide Complementary to SPDEF in a Bleomycin Induced Pulmonary Fibrosis Model

[0729] Groups of twelve 12-week old male C57BL/6 mice (Jackson Laboratory) were treated with Compound No. 652553 (described herein above).

[0730] Following a total of 3 loading doses of 10 mg/kg/dose of Compound No. 652553 administered orotracheally twice per week prior to Day 0 (DO), the mice were dosed orotracheally twice per week with 10 mg/kg of modified oligonucleotide for a total of 9 doses. Following the loading dose, the mice were also treated with 2.5u/kg of Bleomycin on Day 0 and 2.5u/kg of Bleomycin on Day 7. One group of control mice were treated in a similar manner with saline instead of modified oligonucleotide. Mice were sacrificed on Day 21 (24 hours post final dose of modified oligonucleotide). The treatment groups were compared to a control group of twelve 12-week old male C57BL/6 mice (Jackson Laboratory) that were naïve and were not treated with either modified oligonucleotide or Bleomycin.

### Body Weights and Survivals

[0731] Body weights of CD-1 mice were measured at days 0 and 20, and the average body weight for each group is presented in the table below. In addition, the number of animals at the Days 0 and 20 were counted and are presented in the table below.

TABLE 96
Body weights (in grams) and survivals

| | Body weight (g) | | number of animals | |
|---|---|---|---|---|
| Treatment | Day 0 | Day 20 | Day 0 | Day 20 |
| naïve | 32 | 33 | 12 | 12 |
| Bleomycin + saline | 29 | 27 | 12 | 11 |
| Belomycin + 652553 | 29 | 29 | 12 | 12 |

### Lung Function

[0732] Lung function was measured on day 8 using the Penh score obtained through unrestrained plethysmography. A higher Penh score indicates more lung constriction. The results, shown in the table below, indicate that pre-treatment with a modified oligonucleotide complementary to SPDEF prevented the decrease in lung function (or increase in Penh score) observed in the bleomycin induced pulmonary fibrosis mouse model.

TABLE 97
Penh Scores

| Treatment | Penh Score |
|---|---|
| naïve | 0.9 |
| Belomycin + saline | 3.9 |
| Bleomycin + 652553 | 1.4 |

### RNA Analysis

[0733] On Day 21, RNA was extracted from the lungs of the mice for quantitative real-time RTPCR analysis of SPDEF RNA expression. In addition to SPDEF RNA levels, the RNA expression levels of various mouse lung fibrosis genes, including SPDEF, MUC5b, MUC5ac, COL1A1, ACTA2, TIMP1, CTGF, CHOP, GOB5, BiP and OPN was tested using quantitative real-time RTPCR. The primer-probe sets used to measure levels of RNA of mouse SPDEF, MUC5b, MUC5ac, COL1A1, ACTA2, TIMP1, CTGF, CHOP, GOB5 and OPN are listed in the table below. Additionally, IDT Technologies mouse primer probe set Mm.PT.58-6648074 was used to amplify FOXA3 RNA, IDT Technologies mouse primer probe set Mm.PT.58-43572495 was used to amplify AGR2 RNA, IDT technologies mouse primer probe set Mm.PT.58.6115287.g. was used to amplify BiP RNA, and IDT technologies mouse primer probe set 206445781 was used to amplify ATF4 RNA.

TABLE 98
List of mouse primer-probe sets used for RNA analysis

| | primer- | | SEQ | | SEQ | | SEQ |
|---|---|---|---|---|---|---|---|
| Target | probe set | Forward | ID | | ID | | ID |
| RNA | name | primer | NO. | Reverse Primer | NO. | Probe | NO. |
| SPDEF | RTS4444 | GCGAGGTC | 2288 | GCCACTTCTG | 2289 | CTTCTGAACATCAC | 2290 |
| | | CTGAAAGA | | CACGTTACCA | | AGCAGACCCTGGG | |
| | | TATTGAG | | | | | |
| MUC5b | RTS3745 | TGACTCCAT | 2291 | AGGTGTAAGG | 2292 | CACCTTCATCCCAC | 2293 |
| | | ATCCTCATC | | CGCTCATGCT | | CTATCACTGTCTTC | |
| | | CACAAG | | | | CC | |
| MUC5ac | RTS942 | TCACGTGC | 2294 | TGCTATCATC | 2295 | CCAGCCTTGTGGCC | 2296 |
| | | CCTGATAA | | CCTGTAGCAG | | CATCC | |
| | | CCAA | | TAGTG | | | |
| COL1Al | mcolla1 | TGGATTCCC | 2297 | TCAGCTGGAT | 2298 | AAGCGAGGGCTCC | 2299 |
| | | GTTCGAGT | | AGCGACATC | | GACCCGA | |
| | | ACG | | | | | |
| ACTA2 | mActa2_LTS00192 | TGCCTCTA | 2300 | GCAGGAATG | 2301 | CGTTTTGTGGATCA | 2302 |
| | | GCACACAA | | ATTTGGAAAG | | GCGCCTCCA | |
| | | CTGTGA | | GAA | | | |
| TIMP1 | LTS00190 | TCATGGAA | 2303 | GCGGCCCGTG | 2304 | CCCACAAGTCCCA | 2305 |
| | | AGCCTCTGT | | ATGAGA | | GAACCGCAGTG | |
| | | GGAT | | | | | |
| OPN | RTS3534 | TGGTGCCT | 2306 | GTTTCTTGCTT | 2307 | AAGCAGAATCTCC | 2308 |
| | | GACCCATC | | AAAGTCATCC | | TTGCGCCACAGAA | |
| | | TCA | | TTTTCTT | | | |
| CTGF | RTS352 | GCTCAGGG | 2309 | GCCCCCCACC | 2310 | TCATAATCAAAGA | 2311 |
| | | TAAGGTCC | | CCAAA | | AGCAGCAAGCACT | |
| | | GATTC | | | | TCCTG | |
| CHOP | mDDIT3_LTS00982 | TGAGCCTA | 2312 | TCTGGAACAC | 2313 | CAGCGACAGAGCC | 2314 |
| | | ACACGTCG | | TCTCTCCTCA | | AGAATAACAGCCG | |
| | | ATTATATCA | | GGTT | | | |
| Gob5 | RTS1845 | CACTAAGG | 2315 | AGCTCGCTTG | 2316 | CCCAGGCACGGCT | 2317 |
| | | TGGCCTAC | | AATGCTGTAT | | AAGGTTGGC | |
| | | CTCCAA | | TTC | | | |

[0734] The levels of SPDEF RNA expression are presented as percent SPDEF RNA, relative to bleomycin+saline treated animals, normalized to cyclophilin A (% control). Mouse cyclophilin A was amplified using primer probe set m_cyclo24 (forward sequence TCGCCGCTTGCTGCA, designated herein as SEQ ID NO: 2318; reverse sequence ATCGGCCGTGATGTCGA, designated herein as SEQ ID NO: 2319; probe sequence CCATGGTCAACCCCACCGTGTTC, designated herein as SEQ ID NO: 2320). The levels of MUC5b RNA expression are presented as percent MUC5b RNA relative to bleomycin+saline treated animals, normalized to cyclophilin A (% control). The levels of MUC5ac RNA expression are presented as percent MUC5ac RNA relative to bleomycin+saline treated animals, normalized to cyclophilin A (% control). The levels of COL1A1 RNA expression are presented as percent COL1A1 RNA relative to bleomycin+saline treated animals, normalized to cyclophilin A (% control). The levels of ACTA2 RNA expression are presented as percent ACTA2 RNA relative to bleomycin+saline treated animals, normalized to cyclophilin A (% control). The levels of TIMP1 RNA expression are presented as percent TIMP1 RNA relative to bleomycin+saline treated animals, normalized to cyclophilin A (% control). The levels of OPN RNA expression are presented as percent OPN RNA relative to bleomycin+saline treated animals, normalized to cyclophilin A (% control). The levels of CTGF RNA expression are presented as percent CTGF RNA relative to bleomycin+saline treated animals, normalized to cyclophilin A (% control). The levels of CHOP RNA expression are presented as percent CHOP RNA relative to bleomycin+saline treated animals, normalized to cyclophilin A (% control). The levels of BiP RNA expression are presented as percent BiP RNA relative to bleomycin+saline treated animals, normalized to cyclophilin A (% control). The levels of ATF4 RNA expression are presented as percent ATF4 RNA relative to bleomycin+saline treated animals, normalized to cyclophilin A (% control). The levels of Foxa3 RNA expression are presented as percent Foxa3 RNA relative to bleomycin+saline treated animals, normalized to cyclophilin A (% control). The levels of AGR2 RNA expression are presented as percent AGR2 RNA relative to bleomycin+saline treated animals, normalized to cyclophilin A (% control). The levels of GOB5 RNA expression are presented as percent GOB5 RNA relative to bleomycin+saline treated animals, normalized to cyclophilin A (% control).

[0735] As presented in the table below, treatment with SPDEF modified oligonucleotide resulted in reduction of SPDEF RNA in comparison to the naive and bleomycin+saline treated controls. In addition, treatment with SPDEF modified oligonucleotide resulted in significant reduction of RNA expression of mucous and fibrosis markers compared to animals treated with Bleomycin+saline.

TABLE 99
Modified oligonucleotide mediated inhibition of SPDEF
RNA expression and fibrosis gene RNA expression

| | | Bleomycin + | Belomycin + |
|---|---|---|---|
| Gene | Naïve | saline | 652553 |
| SPDEF (% control) | 198 | 100 | 60 |
| MUC5b (% control) | 244 | 100 | 41 |
| MUC5ac (% control) | 178 | 100 | 45 |
| COL1A1 (% control) | 37 | 100 | 50 |
| ACTA2 (% control) | 176 | 100 | 70 |
| TIMP1 (% control) | 13 | 100 | 45 |
| OPN (% control) | 11 | 100 | 26 |
| CTGF (% control) | 71 | 100 | 58 |
| CHOP (% control) | 157 | 100 | 93 |
| BiP (% control) | 154 | 100 | 86 |
| ATF4 (% control) | 152 | 100 | 76 |
| Foxa3 (% control) | 90 | 100 | 89 |
| Agr2 (% control) | 65 | 100 | 111 |
| Gob5 (% control) | 33 | 100 | 15 |

### Bronchoalveolar Lavage (BAL) Cellular Profile

[0736] To evaluate the effect of modified oligonucleotides on lung function, levels of macrophages (MAC), neutrophils (NEU), lymphocytes (LYM), and eosinophils (EOS) in the bronchoalveolar lavage fluid (BAL) were measured. Mouse lungs were lavaged two times with 0.5 ml of PBS containing 1% BSA (Sigma-Aldrich). BAL fluid samples were centrifuged at low speed to generate a cell pellet and a cell-free supernatant. The recovered airway cells were resuspended in PBS with 1% BSA, and a cytospin was performed. Cells were stained with Diff-Quik stain (VWR). Data are presented as the percent of cells present in the total recovered BAL cell population.

[0737] The results, shown in the table below, indicate that pre-treatment with a modified oligonucleotide complementary to SPDEF prevented the recruitment of inflammatory cells to the lungs.

TABLE 100
Cellular profile in BAL

| Treatment | MAC (%) | LYM (%) | EOS (%) | NEU (%) |
|---|---|---|---|---|
| naïve | 98 | 2 | 0 | 0 |
| Bleomycin + saline | 45 | 41 | 0 | 14 |
| Belomycin + 652553 | 77 | 11 | 0 | 12 |

### Example 12: Design of RNAi Compounds with Antisense RNAi Oligonucleotides Complementary to a Human SPDEF Nucleic Acid

[0738] RNAi compounds comprising antisense RNAi oligonucleotides complementary to a human SPDEF nucleic acid and sense RNAi oligonucleotides complementary to the antisense RNAi oligonucleotides were designed as follows.

[0739] The RNAi compounds in the tables below consist of an antisense RNAi oligonucleotide and a sense RNAi oligonucleotide, wherein, in each case the antisense RNAi oligonucleotides is 23 nucleosides in length; has a sugar motif (from 5′ to 3′) of: yfyfyfyfyfyfyfyfyfyfyyy; wherein “y” represents a 2′-O-methylribosyl sugar, and the “f” represents a 2′-fluororibosyl sugar; and a linkage motif (from 5′ to 3′) of: ssooooooooooooooooooss; wherein ‘o’ represents a phosphodiester internucleoside linkage and 's′ represents a phosphorothioate internucleoside linkage. The sense RNAi oligonucleotides in each case is 21 nucleosides in length; has a sugar motif (from 5′ to 3′) of: fyf yfyfyfyffyf, wherein “y” represents a 2′-O-methylribosyl sugar, and the “f” represents a 2′-fluororibosyl sugar; and a linkage motif (from 5′ to 3′) of: ssooooooooooooooooss; wherein ‘o’ represents a phosphodiester internucleoside linkage and 's′ represents a phosphorothioate internucleoside linkage. Each antisense RNAi oligonucleotide is complementary to the target nucleic acid (SPDEF), and each sense RNAi oligonucleotides is complementary to the first of the 21 nucleosides of the antisense RNAi oligonucleotide (from 5′ to 3′) wherein the last two 3′-nucleosides of the antisense RNAi oligonucleotides are not paired with the sense RNAi oligonucleotide (are overhanging nucleosides).

[0740] “Start site” indicates the 5′-most nucleoside to which the antisense RNAi oligonucleotides is complementary in the human gene sequence. “Stop site” indicates the 3′-most nucleoside to which the antisense RNAi oligonucleotide is complementary in the human gene sequence. Each modified antisense RNAi oligonucleoside listed in the tables below is 100% complementary to SEQ ID NO: 1 (described herein above).

TABLE 101
RNAi compounds targeting human SPDEF SEQ ID NO: 1

| | | | | SEQ ID | SEQ ID | | | |
|---|---|---|---|---|---|---|---|---|
| | | Antisense | SEQ | NO: 1 | NO: 1 | | | SEQ |
| Compound | Antisense | Sequence | ID | Antisense | Antisense | | Sense Sequence | ID |
| Number | ID | (5' to 3') | NO | Start Site | Stop Site | Sense ID | (5′ to 3′) | NO |
| 1527452 | 1527466 | GCAGGAAUGUGCU | 2324 | 25 | 47 | 1527461 | UUCCUCCCAGCA | 2511 |
| | | GGGAGGAAGU | | | | | CAUUCCUGC | |
| 1527453 | 1527469 | AGGGAGCUGGCAG | 2325 | 85 | 107 | 1527459 | CAAGCCUGCUGC | 2512 |
| | | CAGGCUUGGA | | | | | CAGCUCCCU | |
| 1527454 | 1527464 | CAGUGUGGACACG | 2326 | 45 | 67 | 1527458 | CACUCUGCCGUG | 2513 |
| | | GCAGAGUGCA | | | | | UCCACACUG | |
| 1527455 | 1527467 | AGUCAGACAGCCG | 2327 | 5 | 27 | 1527463 | UCAUCUCGCGGC | 2514 |
| | | CGAGAUGAAG | | | | | UGUCUGACU | |
| 1527456 | 1527468 | GGAGGACUGGGUC | 2328 | 65 | 87 | 1527460 | GCCCCACAGACC | 2515 |
| | | UGUGGGGCAG | | | | | CAGUCCUCC | |
| 1527457 | 1527465 | GCCCAACCUGAGG | 2329 | 105 | 127 | 1527462 | UGCAAGCCCCUC | 2516 |
| | | GGCUUGCAGG | | | | | AGGUUGGGC | |
| 1527470 | 1527486 | CCUGCUGGCACCG | 2330 | 125 | 147 | 1527479 | CCUUGCCACGGU | 2517 |
| | | UGGCAAGGCC | | | | | GCCAGCAGG | |
| 1527471 | 1527483 | CCCUCUGAGGUCU | 2331 | 185 | 207 | 1527476 | CAGCCCUGAGAC | 2518 |
| | | CAGGGCUGCG | | | | | CUCAGAGGG | |
| 1527473 | 1527487 | GCGUGCCUGUAGG | 2332 | 165 | 187 | 1527480 | GGGGACUCCCUA | 2519 |
| | | GAGUCCCCUA | | | | | CAGGCACGC | |
| 1527474 | 1527485 | CAGGUUGGCCACU | 2333 | 225 | 247 | 1527481 | AGGCCCCCAGUG | 2520 |
| | | GGGGGCCUGG | | | | | GCCAACCUG | |
| 1527475 | 1527482 | CUACCCCCAGCCC | 2334 | 145 | 167 | 1527478 | GCAGCCCUGGGC | 2521 |
| | | AGGGCUGCCU | | | | | UGGGGGUAG | |
| 1527488 | 1527502 | CUGGUGGCAGAGG | 2335 | 245 | 267 | 1527496 | GAGUGCUGCCUC | 2522 |
| | | CAGCACUCAG | | | | | UGCCACCAG | |
| 1527489 | 1527500 | GUGCCAACUUCAG | 2336 | 345 | 367 | 1527494 | CCCGGCCCCUGA | 2523 |
| | | GGGCCGGGAA | | | | | AGUUGGCAC | |
| 1527490 | 1527504 | GAAGAGGUGUGG | 2337 | 325 | 347 | 1527497 | CUCAGCUGCCCA | 2524 |
| | | GCAGCUGAGGC | | | | | CACCUCUUC | |
| 1527491 | 1527501 | CAGGCAUCUGGGG | 2338 | 285 | 307 | 1527495 | CGCUGGCCCCCC | 2525 |
| | | GGCCAGCGGA | | | | | AGAUGCCUG | |
| 1527492 | 1527505 | GGCCACUGGCGUG | 2339 | 305 | 327 | 1527499 | GGCUGAGACACG | 2526 |
| | | UCUCAGCCAG | | | | | CCAGUGGCC | |
| 1527493 | 1527503 | GGAACCAGGGGCC | 2340 | 265 | 287 | 1527498 | GCCCUGCUGGCC | 2527 |
| | | AGCAGGGCUG | | | | | CCUGGUUCC | |
| 1527506 | 1527518 | CCAGGGAGCUGUC | 2341 | 365 | 387 | 1527515 | CUGCAGCAGACA | 2528 |
| | | UGCUGCAGUG | | | | | GCUCCCUGG | |
| 1527507 | 1527522 | AGCAGGAGGUGGC | 2342 | 465 | 487 | 1527512 | AUCCCCCAGCCA | 2529 |
| | | UGGGGGAUAC | | | | | CCUCCUGCU | |
| 1527508 | 1527520 | UACGCUGCUCAGA | 2343 | 445 | 467 | 1527513 | AGCCCGGGUCUG | 2530 |
| | | CCCGGGCUGG | | | | | AGCAGCGUA | |
| 1527509 | 1527519 | GUCUGUUAGCUGC | 2344 | 385 | 407 | 1527514 | GGCACCAGGCAG | 2531 |
| | | CUGGUGCCCA | | | | | CUAACAGAC | |
| 1527510 | 1527523 | CUGUUUGGGCUGG | 2345 | 405 | 427 | 1527517 | CACAGCCGCCAG | 2532 |
| | | CGGCUGUGUC | | | | | CCCAAACAG | |
| 1527511 | 1527521 | UGGCGCUGCCCAU | 2346 | 425 | 447 | 1527516 | GCAGCGGCAUGG | 2533 |
| | | GCCGCUGCUG | | | | | GCAGCGCCA | |
| 1527524 | 1527537 | GCGACACCGUGUC | 2347 | 485 | 507 | 1527530 | UGCCCCCCGACA | 2534 |
| | | GGGGGGCAGC | | | | | CGGUGUCGC | |
| 1527525 | 1527536 | AAGGCGGACAGGC | 2348 | 585 | 607 | 1527532 | CGAGCAGGGCCU | 2535 |
| | | CCUGCUCGGG | | | | | GUCCGCCUU | |
| 1527526 | 1527539 | GGGCGUGGCGGGU | 2349 | 565 | 587 | 1527531 | CCCAGUCCACCC | 2536 |
| | | GGACUGGGAC | | | | | GCCACGCCC | |
| 1527527 | 1527538 | AGACCCACUGCCC | 2350 | 525 | 547 | 1527533 | GGCAGCGGGGGC | 2537 |
| | | CCGCUGCCGC | | | | | AGUGGGUCU | |
| 1527528 | 1527540 | GACUCCAGUCCCG | 2351 | 545 | 567 | 1527535 | UCGAGAGACGGG | 2538 |
| | | UCUCUCGAGA | | | | | ACUGGAGUC | |
| 1527529 | 1527541 | CGCCUUCUCCAAG | 2352 | 505 | 527 | 1527534 | CGGACAGGCUUG | 2539 |
| | | CCUGUCCGCG | | | | | GAGAAGGCG | |
| 1527542 | 1527556 | UGUCAAAGUAGG | 2353 | 605 | 627 | 1527549 | UCUACCUCUCCU | 2540 |
| | | AGAGGUAGAAG | | | | | ACUUUGACA | |
| 1527543 | 1527559 | CUGUCAAUGACCG | 2354 | 705 | 727 | 1527551 | GCAGUGCCCGGU | 2541 |
| | | GGCACUGCUC | | | | | CAUUGACAG | |
| 1527544 | 1527558 | CUCAGGCUCCUCA | 2355 | 685 | 707 | 1527550 | GAGCCACCUGAG | 2542 |
| | | GGUGGCUCCU | | | | | GAGCCUGAG | |
| 1527545 | 1527554 | CCUCCCGACUGCU | 2356 | 665 | 687 | 1527548 | CUGGGGCCAGCA | 2543 |
| | | GGCCCCAGGG | | | | | GUCGGGAGG | |
| 1527546 | 1527557 | GGGGCCUUGGCUG | 2357 | 645 | 667 | 1527552 | CAGCUGGGCAGC | 2544 |
| | | CCCAGCUGCU | | | | | CAAGGCCCC | |
| 1527547 | 1527555 | GCUGUCCUCAGGG | 2358 | 625 | 647 | 1527553 | AUGCUGUACCCU | 2545 |
| | | UACAGCAUGU | | | | | GAGGACAGC | |
| 1527560 | 1527572 | CCCGCCGGGCACC | 2359 | 745 | 767 | 1527567 | CUGGACUUGGUG | 2546 |
| | | AAGUCCAGGC | | | | | CCCGGCGGG | |
| 1527561 | 1527573 | GAGCACUUCGCCC | 2360 | 805 | 827 | 1527566 | AUGGUGGUGGGC | 2547 |
| | | ACCACCAUGG | | | | | GAAGUGCUC | |
| 1527562 | 1527574 | UGGACUGCACCUG | 2361 | 785 | 807 | 1527568 | CGCUGGAGCAGG | 2548 |
| | | CUCCAGCGAG | | | | | UGCAGUCCA | |
| 1527563 | 1527577 | GAGUGCUCCUCCA | 2362 | 765 | 787 | 1527571 | GCUGACCUUGGA | 2549 |
| | | AGGUCAGCCC | | | | | GGAGCACUC | |
| 1527564 | 1527575 | GGCUGCCCGCUGG | 2363 | 725 | 747 | 1527569 | GCCAAGCCCCAG | 2550 |
| | | GGCUUGGCUG | | | | | CGGGCAGCC | |
| 1527565 | 1527576 | CAGGCCGUCUCGA | 2364 | 825 | 847 | 1527570 | CAAGGACAUCGA | 2551 |
| | | UGUCCUUGAG | | | | | GACGGCCUG | |
| 1527578 | 1527590 | CGGUGAUGUUGA | 2365 | 845 | 867 | 1527587 | GCAAGCUGCUCA | 2552 |
| | | GCAGCUUGCAG | | | | | ACAUCACCG | |
| 1527579 | 1527591 | AGCUCCUGGAAGG | 2366 | 945 | 967 | 1527584 | GGGCAAGGCCUU | 2553 |
| | | CCUUGCCCAU | | | | | CCAGGAGCU | |
| 1527580 | 1527594 | CACUUCUGCACAU | 2367 | 885 | 907 | 1527585 | CCCCAGCAAUGU | 2554 |
| | | UGCUGGGGCU | | | | | GCAGAAGUG | |
| 1527581 | 1527595 | CAUGGGGGGCAGC | 2368 | 925 | 947 | 1527588 | CAAUACCGGCUG | 2555 |
| | | CGGUAUUGGU | | | | | CCCCCCAUG | |
| 1527582 | 1527592 | GGUGCUCUGUCCA | 2369 | 905 | 927 | 1527589 | GGCUCCUGUGGA | 2556 |
| | | CAGGAGCCAC | | | | | CAGAGCACC | |
| 1527583 | 1527593 | GCUCCAGUCCAUG | 2370 | 865 | 887 | 1527586 | GCAGAUCCCAUG | 2557 |
| | | GGAUCUGCGG | | | | | GACUGGAGC | |
| 1527596 | 1527598 | CGCACAGCUCCUU | 2371 | 965 | 987 | 1527597 | UGGCGGGCAAGG | 2558 |
| | | GCCCGCCAGC | | | | | AGCUGUGCG | |
| 1527599 | 1527610 | GAACUGCUCCUCC | 2372 | 985 | 1007 | 1527605 | GCCAUGUCGGAG | 2559 |
| | | GACAUGGCGC | | | | | GAGCAGUUC | |
| 1527600 | 1527609 | CCCAGGGGCGAGC | 2373 | 1005 | 1027 | 1527604 | CCGCCAGCGCUC | 2560 |
| | | GCUGGCGGAA | | | | | GCCCCUGGG | |
| 1527601 | 1527611 | UGACUUCCAGAUG | 2374 | 1045 | 1067 | 1527606 | CACCUGGACAUC | 2561 |
| | | UCCAGGUGGG | | | | | UGGAAGUCA | |
| 1527602 | 1527612 | GGGCGUGCAGCAC | 2375 | 1025 | 1047 | 1527607 | GUGGGGAUGUGC | 2562 |
| | | AUCCCCACCC | | | | | UGCACGCCC | |
| 1527603 | 1527613 | CGCUCUUUCAUCC | 2376 | 1065 | 1087 | 1527608 | AGCGGCCUGGAU | 2563 |
| | | AGGCCGCUGA | | | | | GAAAGAGCG | |
| 1527614 | 1527630 | CUGUCGGUCCAGC | 2377 | 1125 | 1147 | 1527625 | UGAGGAGAGCUG | 2564 |
| | | UCUCCUCACU | | | | | GACCGACAG | |
| 1527615 | 1527631 | ACUGGUCGAGGCA | 2378 | 1105 | 1127 | 1527622 | CACUACUGUGCC | 2565 |
| | | CAGUAGUGAA | | | | | UCGACCAGU | |
| 1527616 | 1527626 | AGCAUGAUGAGUC | 2379 | 1145 | 1167 | 1527621 | GCGAGGUGGACU | 2566 |
| | | CACCUCGCUG | | | | | CAUCAUGCU | |
| 1527617 | 1527627 | GAAUCGCCCCAGG | 2380 | 1085 | 1107 | 1527623 | GGACUUCACCUG | 2567 |
| | | UGAAGUCCGC | | | | | GGGCGAUUC | |
| 1527618 | 1527629 | CAGGUGGAUGGGC | 2381 | 1165 | 1187 | 1527620 | UCCGGGCAGCCC | 2568 |
| | | UGCCCGGAGC | | | | | AUCCACCUG | |
| 1527619 | 1527628 | AGCUGUGGGGCUU | 2382 | 1205 | 1227 | 1527624 | UGCUACUCAAGC | 2569 |
| | | GAGUAGCAAC | | | | | CCCACAGCU | |
| 1527632 | 1527649 | AUGCCCUUCUCCU | 2383 | 1245 | 1267 | 1527641 | GCUCAACAAGGA | 2570 |
| | | UGUUGAGCCA | | | | | GAAGGGCAU | |
| 1527633 | 1527647 | GGACGGUUCUUGC | 2384 | 1305 | 1327 | 1527638 | GGGCAUCCGCAA | 2571 |
| | | GGAUGCCCCA | | | | | GAACCGUCC | |
| 1527634 | 1527646 | CCACAGCCGGGCC | 2385 | 1285 | 1307 | 1527639 | GCCCAGGUGGCC | 2572 |
| | | ACCUGGGCUG | | | | | CGGCUGUGG | |
| 1527635 | 1527644 | CUGAGUCCUCAAU | 2386 | 1265 | 1287 | 1527642 | UCUUCAAAAUUG | 2573 |
| | | UUUGAAGAUG | | | | | AGGACUCAG | |
| 1527636 | 1527645 | AACUCCUUGAGGA | 2387 | 1185 | 1207 | 1527640 | GUGGCAGUUCCU | 2574 |
| | | ACUGCCACAG | | | | | CAAGGAGUU | |
| 1527637 | 1527648 | CCACCUAAUGAAG | 2388 | 1225 | 1247 | 1527643 | UAUGGCCGCUUC | 2575 |
| | | CGGCCAUAGC | | | | | AUUAGGUGG | |
| 1527650 | 1527663 | CUGGCGGAUGGAG | 2389 | 1345 | 1367 | 1527658 | CUGAGCCGCUCC | 2576 |
| | | CGGCUCAGCU | | | | | AUCCGCCAG | |
| 1527651 | 1527662 | AUGAUGCCCUUCU | 2390 | 1365 | 1387 | 1527659 | GUAUUACAAGAA | 2577 |
| | | UGUAAUACUG | | | | | GGGCAUCAU | |
| 1527652 | 1527665 | GGAGAGAGGCCCC | 2391 | 1465 | 1487 | 1527657 | CGCCCUCAGGGG | 2578 |
| | | UGAGGGCGGG | | | | | CCUCUCUCC | |
| 1527653 | 1527667 | GAACUGGUAGACG | 2392 | 1405 | 1427 | 1527656 | CAGCGCCUCGUC | 2579 |
| | | AGGCGCUGGG | | | | | UACCAGUUC | |
| 1527654 | 1527664 | GGGAGAUGUCUG | 2393 | 1385 | 1407 | 1527661 | UCCGGAAGCCAG | 2580 |
| | | GCUUCCGGAUG | | | | | ACAUCUCCC | |
| 1527655 | 1527666 | GCUUGUCGUAGUU | 2394 | 1325 | 1347 | 1527660 | CCGCCAUGAACU | 2581 |
| | | CAUGGCGGGA | | | | | ACGACAAGC | |
| 1527668 | 1527683 | GGGUUUCAGGCCC | 2395 | 1445 | 1467 | 1527679 | CUGGCCCAGGGC | 2582 |
| | | UGGGCCAGGC | | | | | CUGAAACCC | |
| 1527669 | 1527685 | UUGGGCUCUGGAA | 2396 | 1545 | 1567 | 1527676 | CUCUGACCUUCC | 2583 |
| | | GGUCAGAGCA | | | | | AGAGCCCAA | |
| 1527670 | 1527684 | GCAGCAGAGCAGA | 2397 | 1525 | 1547 | 1527678 | ACGGGCAGUCUG | 2584 |
| | | CUGCCCGUUU | | | | | CUCUGCUGC | |
| 1527671 | 1527682 | UGGCUGAGGCAGG | 2398 | 1485 | 1507 | 1527677 | CUGCCUGCCCUG | 2585 |
| | | GCAGGCAGGA | | | | | CCUCAGCCA | |
| 1527672 | 1527680 | UUUUCCCCCAUCU | 2399 | 1505 | 1527 | 1527674 | AGGCCCUGAGAU | 2586 |
| | | CAGGGCCUGG | | | | | GGGGGAAAA | |
| 1527673 | 1527681 | GGCACUCAGAUGG | 2400 | 1425 | 1447 | 1527675 | CGUGCACCCCAU | 2587 |
| | | GGUGCACGAA | | | | | CUGAGUGCC | |
| 1527686 | 1527699 | UUGGUUGCCCCUC | 2401 | 1565 | 1587 | 1527696 | AGGUCAGGGAGG | 2588 |
| | | CCUGACCUUG | | | | | GGCAACCAA | |
| 1527687 | 1527700 | GUCUCCCUCUGUC | 2402 | 1665 | 1687 | 1527694 | CCCUGGAGGACA | 2589 |
| | | CUCCAGGGGA | | | | | GAGGGAGAC | |
| 1527688 | 1527703 | GGAGCAGCUGGGC | 2403 | 1645 | 1667 | 1527693 | CUCCUCAGGCCC | 2590 |
| | | CUGAGGAGGA | | | | | AGCUGCUCC | |
| 1527689 | 1527702 | GGAAGCACCCCUG | 2404 | 1625 | 1647 | 1527695 | CCCUGGGGCAGG | 2591 |
| | | CCCCAGGGUC | | | | | GGUGCUUCC | |
| 1527690 | 1527701 | CCCAUAUCCCCCU | 2405 | 1585 | 1607 | 1527697 | ACUGCCCCAGGG | 2592 |
| | | GGGGCAGUUG | | | | | GGAUAUGGG | |
| 1527691 | 1527698 | GUCCCGAAGGCCC | 2406 | 1605 | 1627 | 1527692 | GUCCUCUGGGGC | 2593 |
| | | CAGAGGACCC | | | | | CUUCGGGAC | |
| 1527704 | 1527718 | AGGUGUUGGGGA | 2407 | 1685 | 1707 | 1527714 | CAGGGCUGCUCC | 2594 |
| | | GCAGCCCUGUC | | | | | CCAACACCU | |
| 1527705 | 1527721 | GGCAGGGGGAUG | 2408 | 1785 | 1807 | 1527710 | UCUCUGCUCCAU | 2595 |
| | | GAGCAGAGAGA | | | | | CCCCCUGCC | |
| 1527706 | 1527719 | GCCUUUGUCGAGU | 2409 | 1745 | 1767 | 1527712 | GGGCAGUGACUC | 2596 |
| | | CACUGCCCUU | | | | | GACAAAGGC | |
| 1527707 | 1527720 | AGAGGCCUGGACU | 2410 | 1765 | 1787 | 1527715 | CCACAGGCAGUC | 2597 |
| | | GCCUGUGGCC | | | | | CAGGCCUCU | |
| 1527708 | 1527716 | CUUCUGUAGGCUC | 2411 | 1725 | 1747 | 1527711 | CCAGAGCAGAGC | 2598 |
| | | UGCUCUGGAA | | | | | CUACAGAAG | |
| 1527709 | 1527717 | GAAAUGCUGGGG | 2412 | 1705 | 1727 | 1527713 | UGCCUCUGACCC | 2599 |
| | | UCAGAGGCAGG | | | | | CAGCAUUUC | |
| 1527722 | 1527734 | AUGUCUCCCUGCA | 2413 | 1825 | 1847 | 1527728 | UGGCAUGGUGCA | 2600 |
| | | CCAUGCCAGG | | | | | GGGAGACAU | |
| 1527723 | 1527736 | UCUAGUAUCUUUA | 2414 | 1885 | 1907 | 1527730 | AUGGAUAAUAA | 2601 |
| | | UUAUCCAUUC | | | | | AGAUACUAGA | |
| 1527724 | 1527732 | UGCCCAACUCAGG | 2415 | 1845 | 1867 | 1527731 | UCUGCACCCCUG | 2602 |
| | | GGUGCAGAUG | | | | | AGUUGGGCA | |
| 1527725 | 1527733 | UUCCCGGGGGCAC | 2416 | 1865 | 1887 | 1527727 | AGCCAGGAGUGC | 2603 |
| | | UCCUGGCUGC | | | | | CCCCGGGAA | |
| 1527726 | 1527735 | AGGUGUGGUGCA | 2417 | 1805 | 1827 | 1527729 | CUCCCAUUCUGC | 2604 |
| | | GAAUGGGAGGC | | | | | ACCACACCU | |
| 1528231 | 1528242 | GCCCUUCUUGUAA | 2418 | 1360 | 1382 | 1528234 | CGCCAGUAUUAC | 2605 |
| | | UACUGGCGGA | | | | | AAGAAGGGC | |
| 1528323 | 1528334 | UCCAGGCCGCUGA | 2419 | 1055 | 1077 | 1528331 | UCUGGAAGUCAG | 2606 |
| | | CUUCCAGAUG | | | | | CGGCCUGGA | |
| 1528361 | 1528371 | AAGCGGCCAUAGC | 2420 | 1215 | 1237 | 1528364 | GCCCCACAGCUA | 2607 |
| | | UGUGGGGCUU | | | | | UGGCCGCUU | |
| 1528397 | 1528406 | UCUUGUAAUACUG | 2421 | 1355 | 1377 | 1528400 | CCAUCCGCCAGU | 2608 |
| | | GCGGAUGGAG | | | | | AUUACAAGA | |
| 1537130 | 1537145 | GCUGGGAGGAAG | 2422 | 15 | 37 | 1537139 | GCUGUCUGACUU | 2609 |
| | | UCAGACAGCCG | | | | | CCUCCCAGC | |
| 1537131 | 1537141 | AGGGGCUUGCAGG | 2423 | 95 | 117 | 1537135 | GCCAGCUCCCUG | 2610 |
| | | GAGCUGGCAG | | | | | CAAGCCCCU | |
| 1537132 | 1537142 | GUCUGUGGGGCAG | 2424 | 55 | 77 | 1537136 | UGUCCACACUGC | 2611 |
| | | UGUGGACACG | | | | | CCCACAGAC | |
| 1537133 | 1537146 | CAGCAGGCUUGGA | 2425 | 75 | 97 | 1537137 | CCCAGUCCUCCA | 2612 |
| | | GGACUGGGUC | | | | | AGCCUGCUG | |
| 1537134 | 1537144 | CCGUGGCAAGGCC | 2426 | 115 | 137 | 1537138 | UCAGGUUGGGCC | 2613 |
| | | CAACCUGAGG | | | | | UUGCCACGG | |
| 1537140 | 1537147 | ACGGCAGAGUGCA | 2427 | 35 | 57 | 1537143 | CACAUUCCUGCA | 2614 |
| | | GGAAUGUGCU | | | | | CUCUGCCGU | |
| 1537148 | 1537160 | CCCAGGGCUGCCU | 2428 | 135 | 157 | 1537154 | GUGCCAGCAGGC | 2615 |
| | | GCUGGCACCG | | | | | AGCCCUGGG | |
| 1537149 | 1537161 | AGGCAGCACUCAG | 2429 | 235 | 257 | 1537155 | UGGCCAACCUGA | 2616 |
| | | GUUGGCCACU | | | | | GUGCUGCCU | |
| 1537151 | 1537162 | CAAGGGGUGGCCC | 2430 | 195 | 217 | 1537156 | ACCUCAGAGGGC | 2617 |
| | | UCUGAGGUCU | | | | | CACCCCUUG | |
| 1537152 | 1537163 | UCUCAGGGCUGCG | 2431 | 175 | 197 | 1537157 | UACAGGCACGCA | 2618 |
| | | UGCCUGUAGG | | | | | GCCCUGAGA | |
| 1537153 | 1537164 | AGGGAGUCCCCUA | 2432 | 155 | 177 | 1537159 | GCUGGGGGUAGG | 2619 |
| | | CCCCCAGCCC | | | | | GGACUCCCU | |
| 1537166 | 1537181 | GCCAGCAGGGCUG | 2433 | 255 | 277 | 1537174 | UCUGCCACCAGC | 2620 |
| | | GUGGCAGAGG | | | | | CCUGCUGGC | |
| 1537167 | 1537178 | GUCUGCUGCAGUG | 2434 | 355 | 377 | 1537173 | GAAGUUGGCACU | 2621 |
| | | CCAACUUCAG | | | | | GCAGCAGAC | |
| 1537168 | 1537183 | GGGCAGCUGAGGC | 2435 | 315 | 337 | 1537172 | CGCCAGUGGCCU | 2622 |
| | | CACUGGCGUG | | | | | CAGCUGCCC | |
| 1537169 | 1537179 | GUGUCUCAGCCAG | 2436 | 295 | 317 | 1537175 | CCAGAUGCCUGG | 2623 |
| | | GCAUCUGGGG | | | | | CUGAGACAC | |
| 1537170 | 1537182 | GGGGGCCAGCGGA | 2437 | 275 | 297 | 1537176 | CCCCUGGUUCCG | 2624 |
| | | ACCAGGGGCC | | | | | CUGGCCCCC | |
| 1537171 | 1537180 | CAGGGGCCGGGAA | 2438 | 335 | 357 | 1537177 | CACACCUCUUCC | 2625 |
| | | GAGGUGUGGG | | | | | CGGCCCCUG | |
| 1537184 | 1537199 | UGCCUGGUGCCCA | 2439 | 375 | 397 | 1537193 | CAGCUCCCUGGG | 2626 |
| | | GGGAGCUGUC | | | | | CACCAGGCA | |
| 1537185 | 1537197 | GGCUGGGGGAUAC | 2440 | 455 | 477 | 1537191 | UGAGCAGCGUAU | 2627 |
| | | GCUGCUCAGA | | | | | CCCCCAGCC | |
| 1537186 | 1537196 | AGACCCGGGCUGG | 2441 | 435 | 457 | 1537190 | GGGCAGCGCCAG | 2628 |
| | | CGCUGCCCAU | | | | | CCCGGGUCU | |
| 1537187 | 1537198 | CAUGCCGCUGCUG | 2442 | 415 | 437 | 1537192 | AGCCCAAACAGC | 2629 |
| | | UUUGGGCUGG | | | | | AGCGGCAUG | |
| 1537188 | 1537200 | UGGCGGCUGUGUC | 2443 | 395 | 417 | 1537194 | AGCUAACAGACA | 2630 |
| | | UGUUAGCUGC | | | | | CAGCCGCCA | |
| 1537189 | 1537201 | GUCGGGGGGCAGC | 2444 | 475 | 497 | 1537195 | CACCUCCUGCUG | 2631 |
| | | AGGAGGUGGC | | | | | CCCCCCGAC | |
| 1537202 | 1537216 | AAGCCUGUCCGCG | 2445 | 495 | 517 | 1537210 | CACGGUGUCGCG | 2632 |
| | | ACACCGUGUC | | | | | GACAGGCUU | |
| 1537204 | 1537218 | GGCCCUGCUCGGG | 2446 | 575 | 597 | 1537212 | CCGCCACGCCCG | 2633 |
| | | CGUGGCGGGU | | | | | AGCAGGGCC | |
| 1537205 | 1537219 | GGUGGACUGGGAC | 2447 | 555 | 577 | 1537211 | GGACUGGAGUCC | 2634 |
| | | UCCAGUCCCG | | | | | CAGUCCACC | |
| 1537206 | 1537217 | CCGUCUCUCGAGA | 2448 | 535 | 557 | 1537213 | GCAGUGGGUCUC | 2635 |
| | | CCCACUGCCC | | | | | GAGAGACGG | |
| 1537207 | 1537214 | CCCCCGCUGCCGC | 2449 | 515 | 537 | 1537208 | UGGAGAAGGCGG | 2636 |
| | | CUUCUCCAAG | | | | | CAGCGGGGG | |
| 1537220 | 1537233 | CUGCCCAGCUGCU | 2450 | 635 | 657 | 1537230 | CUGAGGACAGCA | 2637 |
| | | GUCCUCAGGG | | | | | GCUGGGCAG | |
| 1537221 | 1537235 | CCGGGCACUGCUC | 2451 | 695 | 717 | 1537227 | AGGAGCCUGAGC | 2638 |
| | | AGGCUCCUCA | | | | | AGUGCCCGG | |
| 1537222 | 1537237 | UGGGGCUUGGCUG | 2452 | 715 | 737 | 1537231 | GUCAUUGACAGC | 2639 |
| | | UCAAUGACCG | | | | | CAAGCCCCA | |
| 1537223 | 1537232 | UCAGGUGGCUCCU | 2453 | 675 | 697 | 1537228 | CAGUCGGGAGGA | 2640 |
| | | CCCGACUGCU | | | | | GCCACCUGA | |
| 1537224 | 1537236 | GCUGGCCCCAGGG | 2454 | 655 | 677 | 1537229 | GCCAAGGCCCCU | 2641 |
| | | GCCUUGGCUG | | | | | GGGGCCAGC | |
| 1537225 | 1537234 | GGGUACAGCAUGU | 2455 | 615 | 637 | 1537226 | CUACUUUGACAU | 2642 |
| | | CAAAGUAGGA | | | | | GCUGUACCC | |
| 1537238 | 1537250 | CCAAGGUCAGCCC | 2456 | 755 | 777 | 1537244 | UGCCCGGCGGGC | 2643 |
| | | GCCGGGCACC | | | | | UGACCUUGG | |
| 1537239 | 1537252 | CUGCUCCAGCGAG | 2457 | 775 | 797 | 1537248 | GAGGAGCACUCG | 2644 |
| | | UGCUCCUCCA | | | | | CUGGAGCAG | |
| 1537240 | 1537254 | ACCAAGUCCAGGC | 2458 | 735 | 757 | 1537249 | AGCGGGCAGCCU | 2645 |
| | | UGCCCGCUGG | | | | | GGACUUGGU | |
| 1537241 | 1537251 | CGAUGUCCUUGAG | 2459 | 815 | 837 | 1537245 | GCGAAGUGCUCA | 2646 |
| | | CACUUCGCCC | | | | | AGGACAUCG | |
| 1537242 | 1537255 | GAGCAGCUUGCAG | 2460 | 835 | 857 | 1537247 | GAGACGGCCUGC | 2647 |
| | | GCCGUCUCGA | | | | | AAGCUGCUC | |
| 1537243 | 1537253 | CCCACCACCAUGG | 2461 | 795 | 817 | 1537246 | GGUGCAGUCCAU | 2648 |
| | | ACUGCACCUG | | | | | GGUGGUGGG | |
| 1537256 | 1537268 | AUGGGAUCUGCGG | 2462 | 855 | 877 | 1537262 | CAACAUCACCGC | 2649 |
| | | UGAUGUUGAG | | | | | AGAUCCCAU | |
| 1537257 | 1537272 | CCACAGGAGCCAC | 2463 | 895 | 917 | 1537264 | GUGCAGAAGUGG | 2650 |
| | | UUCUGCACAU | | | | | CUCCUGUGG | |
| 1537258 | 1537269 | CAUUGCUGGGGCU | 2464 | 875 | 897 | 1537263 | UGGACUGGAGCC | 2651 |
| | | CCAGUCCAUG | | | | | CCAGCAAUG | |
| 1537259 | 1537270 | CUUGCCCGCCAGC | 2465 | 955 | 977 | 1537267 | UUCCAGGAGCUG | 2652 |
| | | UCCUGGAAGG | | | | | GCGGGCAAG | |
| 1537260 | 1537271 | AGGCCUUGCCCAU | 2466 | 935 | 957 | 1537265 | UGCCCCCCAUGG | 2653 |
| | | GGGGGGCAGC | | | | | GCAAGGCCU | |
| 1537261 | 1537273 | AGCCGGUAUUGGU | 2467 | 915 | 937 | 1537266 | GACAGAGCACCA | 2654 |
| | | GCUCUGUCCA | | | | | AUACCGGCU | |
| 1537274 | 1537285 | CACAUCCCCACCC | 2468 | 1015 | 1037 | 1537280 | UCGCCCCUGGGU | 2655 |
| | | AGGGGCGAGC | | | | | GGGGAUGUG | |
| 1537275 | 1537282 | AUGUCCAGGUGGG | 2469 | 1035 | 1057 | 1537278 | GCUGCACGCCCA | 2656 |
| | | CGUGCAGCAC | | | | | CCUGGACAU | |
| 1537276 | 1537284 | AGCGCUGGCGGAA | 2470 | 995 | 1017 | 1537279 | AGGAGCAGUUCC | 2657 |
| | | CUGCUCCUCC | | | | | GCCAGCGCU | |
| 1537277 | 1537283 | UCCGACAUGGCGC | 2471 | 975 | 997 | 1537281 | GGAGCUGUGCGC | 2658 |
| | | ACAGCUCCUU | | | | | CAUGUCGGA | |
| 1537287 | 1537291 | AGGUGAAGUCCGC | 2472 | 1075 | 1097 | 1537289 | AUGAAAGAGCGG | 2659 |
| | | UCUUUCAUCC | | | | | ACUUCACCU | |
| 1537292 | 1537304 | GCACAGUAGUGAA | 2473 | 1095 | 1117 | 1537299 | UGGGGCGAUUCA | 2660 |
| | | UCGCCCCAGG | | | | | CUACUGUGC | |
| 1537293 | 1537306 | GGAACUGCCACAG | 2474 | 1175 | 1197 | 1537300 | CCAUCCACCUGU | 2661 |
| | | GUGGAUGGGC | | | | | GGCAGUUCC | |
| 1537294 | 1537305 | CUUGAGUAGCAAC | 2475 | 1195 | 1217 | 1537298 | CUCAAGGAGUUG | 2662 |
| | | UCCUUGAGGA | | | | | CUACUCAAG | |
| 1537295 | 1537308 | GUCCACCUCGCUG | 2476 | 1135 | 1157 | 1537301 | UGGACCGACAGC | 2663 |
| | | UCGGUCCAGC | | | | | GAGGUGGAC | |
| 1537296 | 1537307 | AGCUCUCCUCACU | 2477 | 1115 | 1137 | 1537303 | CCUCGACCAGUG | 2664 |
| | | GGUCGAGGCA | | | | | AGGAGAGCU | |
| 1537297 | 1537309 | GGCUGCCCGGAGC | 2478 | 1155 | 1177 | 1537302 | CUCAUCAUGCUC | 2665 |
| | | AUGAUGAGUC | | | | | CGGGCAGCC | |
| 1537311 | 1537325 | UGCGGAUGCCCCA | 2479 | 1295 | 1317 | 1537316 | CCCGGCUGUGGG | 2666 |
| | | CAGCCGGGCC | | | | | GCAUCCGCA | |
| 1537312 | 1537324 | GUUCAUGGCGGGA | 2480 | 1315 | 1337 | 1537319 | AAGAACCGUCCC | 2667 |
| | | CGGUUCUUGC | | | | | GCCAUGAAC | |
| 1537313 | 1537327 | AAUUUUGAAGAU | 2481 | 1255 | 1277 | 1537317 | GAGAAGGGCAUC | 2668 |
| | | GCCCUUCUCCU | | | | | UUCAAAAUU | |
| 1537314 | 1537322 | GCCACCUGGGCUG | 2482 | 1275 | 1297 | 1537320 | UGAGGACUCAGC | 2669 |
| | | AGUCCUCAAU | | | | | CCAGGUGGC | |
| 1537315 | 1537326 | CCUUGUUGAGCCA | 2483 | 1235 | 1257 | 1537321 | UCAUUAGGUGGC | 2670 |
| | | CCUAAUGAAG | | | | | UCAACAAGG | |
| 1537329 | 1537340 | UGGGGUGCACGAA | 2484 | 1415 | 1437 | 1537334 | UCUACCAGUUCG | 2671 |
| | | CUGGUAGACG | | | | | UGCACCCCA | |
| 1537330 | 1537342 | ACGAGGCGCUGGG | 2485 | 1395 | 1417 | 1537336 | AGACAUCUCCCA | 2672 |
| | | AGAUGUCUGG | | | | | GCGCCUCGU | |
| 1537331 | 1537343 | UGGCUUCCGGAUG | 2486 | 1375 | 1397 | 1537337 | AAGGGCAUCAUC | 2673 |
| | | AUGCCCUUCU | | | | | CGGAAGCCA | |
| 1537332 | 1537345 | GAGCGGCUCAGCU | 2487 | 1335 | 1357 | 1537338 | CUACGACAAGCU | 2674 |
| | | UGUCGUAGUU | | | | | GAGCCGCUC | |
| 1537333 | 1537344 | CCCUGGGCCAGGC | 2488 | 1435 | 1457 | 1537339 | AUCUGAGUGCCU | 2675 |
| | | ACUCAGAUGG | | | | | GGCCCAGGG | |
| 1537346 | 1537359 | CCCUGAGGGCGGG | 2489 | 1455 | 1477 | 1537354 | GCCUGAAACCCG | 2676 |
| | | UUUCAGGCCC | | | | | CCCUCAGGG | |
| 1537347 | 1537358 | CUCCCUGACCUUG | 2490 | 1555 | 1577 | 1537352 | CCAGAGCCCAAG | 2677 |
| | | GGCUCUGGAA | | | | | GUCAGGGAG | |
| 1537348 | 1537361 | GAAGGUCAGAGCA | 2491 | 1535 | 1557 | 1537355 | UGCUCUGCUGCU | 2678 |
| | | GCAGAGCAGA | | | | | CUGACCUUC | |
| 1537349 | 1537363 | AGACUGCCCGUUU | 2492 | 1515 | 1537 | 1537357 | AUGGGGGAAAAC | 2679 |
| | | UCCCCCAUCU | | | | | GGGCAGUCU | |
| 1537350 | 1537360 | UCUCAGGGCCUGG | 2493 | 1495 | 1517 | 1537353 | UGCCUCAGCCAG | 2680 |
| | | CUGAGGCAGG | | | | | GCCCUGAGA | |
| 1537351 | 1537362 | AGGGCAGGCAGGA | 2494 | 1475 | 1497 | 1537356 | GGCCUCUCUCCU | 2681 |
| | | GAGAGGCCCC | | | | | GCCUGCCCU | |
| 1537364 | 1537378 | GGCCUGAGGAGGA | 2495 | 1635 | 1657 | 1537374 | GGGGUGCUUCCU | 2682 |
| | | AGCACCCCUG | | | | | CCUCAGGCC | |
| 1537365 | 1537376 | CCCCAGAGGACCC | 2496 | 1595 | 1617 | 1537371 | GGGGAUAUGGG | 2683 |
| | | AUAUCCCCCU | | | | | UCCUCUGGGG | |
| 1537366 | 1537377 | GAGCAGCCCUGUC | 2497 | 1675 | 1697 | 1537372 | CAGAGGGAGACA | 2684 |
| | | UCCCUCUGUC | | | | | GGGCUGCUC | |
| 1537367 | 1537381 | GUCCUCCAGGGGA | 2498 | 1655 | 1677 | 1537370 | CCAGCUGCUCCC | 2685 |
| | | GCAGCUGGGC | | | | | CUGGAGGAC | |
| 1537368 | 1537379 | CCUGGGGCAGUUG | 2499 | 1575 | 1597 | 1537375 | GGGGCAACCAAC | 2686 |
| | | GUUGCCCCUC | | | | | UGCCCCAGG | |
| 1537369 | 1537380 | CUGCCCCAGGGUC | 2500 | 1615 | 1637 | 1537373 | GCCUUCGGGACC | 2687 |
| | | CCGAAGGCCC | | | | | CUGGGGCAG | |
| 1537382 | 1537397 | GGUCAGAGGCAGG | 2501 | 1695 | 1717 | 1537389 | CCCCAACACCUG | 2688 |
| | | UGUUGGGGAG | | | | | CCUCUGACC | |
| 1537383 | 1537394 | CAGAAUGGGAGGC | 2502 | 1795 | 1817 | 1537393 | AUCCCCCUGCCU | 2689 |
| | | AGGGGGAUGG | | | | | CCCAUUCUG | |
| 1537384 | 1537398 | UGGAGCAGAGAG | 2503 | 1775 | 1797 | 1537390 | UCCAGGCCUCUC | 2690 |
| | | AGGCCUGGACU | | | | | UCUGCUCCA | |
| 1537385 | 1537396 | ACUGCCUGUGGCC | 2504 | 1755 | 1777 | 1537388 | UCGACAAAGGCC | 2691 |
| | | UUUGUCGAGU | | | | | ACAGGCAGU | |
| 1537386 | 1537399 | AGUCACUGCCCUU | 2505 | 1735 | 1757 | 1537391 | GCCUACAGAAGG | 2692 |
| | | CUGUAGGCUC | | | | | GCAGUGACU | |
| 1537387 | 1537395 | CUCUGCUCUGGAA | 2506 | 1715 | 1737 | 1537392 | CCCAGCAUUUCC | 2693 |
| | | AUGCUGGGGU | | | | | AGAGCAGAG | |
| 1537400 | 1537408 | AGGGGUGCAGAU | 2507 | 1835 | 1857 | 1537404 | CAGGGAGACAUC | 2694 |
| | | GUCUCCCUGCA | | | | | UGCACCCCU | |
| 1537401 | 1537411 | GCACCAUGCCAGG | 2508 | 1815 | 1837 | 1537407 | GCACCACACCUG | 2695 |
| | | UGUGGUGCAG | | | | | GCAUGGUGC | |
| 1537402 | 1537409 | CACUCCUGGCUGC | 2509 | 1855 | 1877 | 1537406 | UGAGUUGGGCAG | 2696 |
| | | CCAACUCAGG | | | | | CCAGGAGUG | |
| 1537403 | 1537410 | UUAUUAUCCAUUC | 2510 | 1875 | 1897 | 1537405 | GCCCCCGGGAAU | 2697 |
| | | CCGGGGGCAC | | | | | GGAUAAUAA | |

### Example 13: Effect of RNAi Compounds on Human SPDEF RNA In Vitro, Single Dose

[0741] Double-stranded RNAi compounds described above were tested in a series of experiments under the same culture conditions. The results for each experiment are presented in separate tables below.

[0742] Cultured VCaP cells at a density of 25000 cells per well were transfected using Lipofectamine 2000 with 500 nM of double-stranded RNAi. After a treatment period of approximately 24 hours, RNA was isolated from the cells and SPDEF RNA levels were measured by quantitative real-time RTPCR. Human primer probe set RTS35007 (described herein above) was used to measure RNA levels. Data was confirmed using a second human primer probe set, RTS35006 (forward sequence CACCTGGACATCTGGAAGTC, designated herein as SEQ ID NO: 2321; reverse sequence CCTTGAGGAACTGCCACAG, designated herein as SEQ ID NO: 2322; probe sequence AGTGAGGAGAGCTGGACCGACA, designated herein as SEQ ID NO: 2323). SPDEF RNA levels were normalized to total RNA content, as measured by RIBOGREEN®. Results are presented as percent change of SPDEF RNA, relative to PBS control (% control). The symbol “f” indicates that the modified oligonucleotide is complementary to the target transcript within the amplicon region of the primer probe set and so the associated data is not reliable. In such instances, additional assays using alternative primer probes must be performed to accurately assess the potency and efficacy of such modified oligonucleotides.

TABLE 102
Reduction of SPDEF RNA by RNAi

| Compound | SPDEF (% control) | SPDEF (% control) |
|---|---|---|
| ID | @500 nM RTS35006 | @ 500 nM RTS35007 |
| 1527452 | 100 | 109 |
| 1527453 | 93 | 127 |
| 1527454 | 122 | 118 |
| 1527455 | 96 | 119 |
| 1527456 | 99 | 112 |
| 1527457 | 99 | 119 |
| 1527471 | 74 | 85 |
| 1527474 | 111 | 125 |
| 1527475 | 94 | 109 |
| 1527488 | 96 | 122 |
| 1527489 | 93 | 103 |
| 1527490 | 54 | 54 |
| 1527491 | 113 | 122 |
| 1527492 | 90 | 113 |
| 1527493 | 76 | 98 |
| 1527506 | 121 | 117 |
| 1527508 | 63 | 83 |
| 1527509 | 91 | 109 |
| 1527511 | 88 | 108 |
| 1527524 | 87 | 88 |
| 1527525 | 84 | 96 |
| 1527526 | 78 | 97 |
| 1527527 | 98 | 123 |
| 1527528 | 82 | 110 |
| 1527529 | 56 | 65 |
| 1527542 | 32 | 41 |
| 1527545 | 91 | 105 |
| 1527546 | 79 | 100 |
| 1527547 | 83 | 97 |
| 1527560 | 63 | 49 |
| 1527561 | 89 | 93 |
| 1527562 | 87 | 111 |
| 1527563 | 72 | 97 |
| 1527564 | 83 | 105 |
| 1527565 | 81 | 97 |
| 1527578 | 73 | 95 |
| 1527579 | 62 | 71 |
| 1527582 | 66 | 77 |
| 1527583 | 78 | 85 |
| 1527596 | 113 | 109 |
| 1527599 | 78 | 85 |
| 1527600 | 95 | 96 |
| 1527601 | 20‡ | 43 |
| 1527602 | 85‡ | 97 |
| 1527603 | 60‡ | 78 |
| 1527614 | 25‡ | 71 |
| 1527616 | 25‡ | 57 |
| 1527617 | 65‡ | 117 |
| 1527618 | 41‡ | 71 |
| 1527619 | 89 | 135 |
| 1527632 | 48 | 35‡ |
| 1527633 | 66 | 65‡ |
| 1527634 | 118 | 97‡ |
| 1527635 | 34 | 43‡ |
| 1527637 | 86 | 98‡ |
| 1527650 | 80 | 108‡ |
| 1527652 | 72 | 69 |
| 1527653 | 65 | 87 |
| 1527654 | 55 | 66 |
| 1527655 | 31 | 22‡ |
| 1527668 | 72 | 80 |
| 1527669 | 76 | 112 |
| 1527670 | 83 | 93 |
| 1527672 | 106 | 126 |
| 1527686 | 86 | 111 |
| 1527687 | 83 | 116 |
| 1527688 | 75 | 102 |
| 1527689 | 78 | 113 |
| 1527690 | 76 | 108 |
| 1527691 | 77 | 105 |
| 1527705 | 72 | 97 |
| 1527706 | 60 | 82 |
| 1527707 | 68 | 94 |
| 1527708 | 71 | 97 |
| 1527722 | 81 | 109 |
| 1527723 | 31 | 43 |
| 1527724 | 60 | 86 |
| 1527725 | 76 | 103 |
| 1527726 | 73 | 102 |

TABLE 103
Reduction of SPDEF RNA by RNAi

| Compound | SPDEF (% control) | SPDEF (% control) |
|---|---|---|
| ID | @500 nM RTS35006 | @ 500 nM RTS35007 |
| 1528323 | 30‡ | 94 |
| 1528361 | 33 | 67‡ |
| 1528397 | 29 | 87 |
| 1537130 | 88 | 143 |
| 1537131 | 114 | 110 |
| 1537132 | 97 | 122 |
| 1537133 | 84 | 100 |
| 1537134 | 81 | 102 |
| 1537140 | 83 | 108 |
| 1537148 | 90 | 75 |
| 1537149 | 91 | 112 |
| 1537151 | 71 | 98 |
| 1537152 | 88 | 105 |
| 1537166 | 88 | 103 |
| 1537167 | 68 | 82 |
| 1537168 | 90 | 93 |
| 1537169 | 110 | 106 |
| 1537170 | 43 | 37 |
| 1537171 | 126 | 120 |
| 1537184 | 86 | 98 |
| 1537185 | 75 | 101 |
| 1537186 | 77 | 111 |
| 1537187 | 74 | 89 |
| 1537202 | 78 | 97 |
| 1537204 | 47 | 41 |
| 1537205 | 67 | 87 |
| 1537206 | 34 | 49 |
| 1537207 | 102 | 95 |
| 1537220 | 86 | 87 |
| 1537221 | 88 | 100 |
| 1537223 | 69 | 84 |
| 1537225 | 49 | 59 |
| 1537238 | 103 | 112 |
| 1537239 | 99 | 103 |
| 1537240 | 60 | 78 |
| 1537241 | 43 | 45 |
| 1537242 | 90 | 104 |
| 1537243 | 70 | 61 |
| 1537256 | 34 | 42 |
| 1537258 | 76 | 74 |
| 1537259 | 90 | 95 |
| 1537260 | 96 | 115 |
| 1537274 | 112 | 96 |
| 1537275 | 84‡ | 92 |
| 1537276 | 124 | 97 |
| 1537277 | 100 | 77 |
| 1537287 | 58‡ | 88 |
| 1537292 | 17‡ | 47 |
| 1537293 | 15‡ | 88 |
| 1537294 | 28‡ | 29 |
| 1537295 | 13‡ | 93 |
| 1537296 | 39‡ | 100 |
| 1537311 | 82 | 65‡ |
| 1537312 | 41 | 1‡ |
| 1537313 | 32 | 30‡ |
| 1537315 | 29 | 7‡ |
| 1537329 | 70 | 99 |
| 1537330 | 70 | 97 |
| 1537331 | 72 | 90 |
| 1537332 | 28 | 2‡ |
| 1537333 | 72 | 84 |
| 1537347 | 69 | 94 |
| 1537348 | 85 | 89 |
| 1537349 | 103 | 115 |
| 1537351 | 76 | 90 |
| 1537364 | 59 | 81 |
| 1537365 | 54 | 58 |
| 1537366 | 68 | 100 |
| 1537368 | 70 | 98 |
| 1537382 | 72 | 92 |
| 1537383 | 97 | 108 |
| 1537384 | 58 | 71 |
| 1537385 | 53 | 77 |
| 1537386 | 65 | 82 |
| 1537387 | 80 | 90 |
| 1537400 | 80 | 110 |
| 1537401 | 83 | 99 |
| 1537402 | 71 | 91 |
| 1537403 | 29 | 30 |

TABLE 104
Reduction of SPDEF RNA by RNAi

| Compound | SPDEF (% control) | SPDEF (% control) |
|---|---|---|
| ID | @500 nM RTS35006 | @ 500 nM RTS35007 |
| 1527470 | 88 | 97 |
| 1527473 | 98 | 99 |
| 1527507 | 108 | 104 |
| 1527510 | 91 | 100 |
| 1527543 | 69 | 73 |
| 1527544 | 87 | 91 |
| 1527580 | 64 | 57 |
| 1527581 | 105 | 101 |
| 1527615 | 40‡ | 53 |
| 1527636 | 74‡ | 84 |
| 1527651 | 27 | 33 |
| 1527671 | 94 | 97 |
| 1527673 | 76 | 80 |
| 1527704 | 98 | 101 |
| 1527709 | 81 | 79 |
| 1528231 | 67 | 79 |
| 1537153 | 94 | 107 |
| 1537188 | 88 | 91 |
| 1537189 | 78 | 85 |
| 1537222 | 89 | 100 |
| 1537224 | 97 | 103 |
| 1537257 | 73 | 80 |
| 1537261 | 61 | 61 |
| 1537297 | 10‡ | 76 |
| 1537314 | 99 | 83‡ |
| 1537346 | 92 | 89 |
| 1537350 | 98 | 100 |
| 1537367 | 88 | 92 |
| 1537369 | 84 | 88 |

The application's sequence listing, which the Patent Office published only in electronic form, follows.

SEQUENCE LISTING (2697 sequences)

SEQ ID NO: 1 - DNA, 1914 bp, Homo sapiens
aactcttcatctcgcggctgtctgacttcctcccagcacattcctgcactctgccgtgtccacactgccccacagacccagtcctccaagcctgctgccagctccctgcaagcccctcaggttgggccttgccacggtgccagcaggcagccctgggctgggggtaggggactccctacaggcacgcagccctgagacctcagagggccaccccttgagggtggccaggcccccagtggccaacctgagtgctgcctctgccaccagccctgctggcccctggttccgctggccccccagatgcctggctgagacacgccagtggcctcagctgcccacacctcttcccggcccctgaagttggcactgcagcagacagctccctgggcaccaggcagctaacagacacagccgccagcccaaacagcagcggcatgggcagcgccagcccgggtctgagcagcgtatcccccagccacctcctgctgccccccgacacggtgtcgcggacaggcttggagaaggcggcagcgggggcagtgggtctcgagagacgggactggagtcccagtccacccgccacgcccgagcagggcctgtccgccttctacctctcctactttgacatgctgtaccctgaggacagcagctgggcagccaaggcccctggggccagcagtcgggaggagccacctgaggagcctgagcagtgcccggtcattgacagccaagccccagcgggcagcctggacttggtgcccggcgggctgaccttggaggagcactcgctggagcaggtgcagtccatggtggtgggcgaagtgctcaaggacatcgagacggcctgcaagctgctcaacatcaccgcagatcccatggactggagccccagcaatgtgcagaagtggctcctgtggacagagcaccaataccggctgccccccatgggcaaggccttccaggagctggcgggcaaggagctgtgcgccatgtcggaggagcagttccgccagcgctcgcccctgggtggggatgtgctgcacgcccacctggacatctggaagtcagcggcctggatgaaagagcggacttcacctggggcgattcactactgtgcctcgaccagtgaggagagctggaccgacagcgaggtggactcatcatgctccgggcagcccatccacctgtggcagttcctcaaggagttgctactcaagccccacagctatggccgcttcattaggtggctcaacaaggagaagggcatcttcaaaattgaggactcagcccaggtggcccggctgtggggcatccgcaagaaccgtcccgccatgaactacgacaagctgagccgctccatccgccagtattacaagaagggcatcatccggaagccagacatctcccagcgcctcgtctaccagttcgtgcaccccatctgagtgcctggcccagggcctgaaacccgccctcaggggcctctctcctgcctgccctgcctcagccaggccctgagatgggggaaaacgggcagtctgctctgctgctctgaccttccagagcccaaggtcagggaggggcaaccaactgccccagggggatatgggtcctctggggccttcgggaccctggggcaggggtgcttcctcctcaggcccagctgctcccctggaggacagagggagacagggctgctccccaacacctgcctctgaccccagcatttccagagcagagcctacagaagggcagtgactcgacaaaggccacaggcagtccaggcctctctctgctccatccccctgcctcccattctgcaccacacctggcatggtgcagggagacatctgcacccctgagttgggcagccaggagtgcccccgggaatggataataaagatactagagaactga

SEQ ID NO: 2 - DNA, 22000 bp, Homo sapiens
tgcttcagcctcccaagtagctgggattacaggtgcctgccaccacgcccagctaattttttgtatgtttagtagagacggggtttcaccacgttgcccaggctggttttgaactcctgatctcaagtgatctgcccaccttggcctcctaaagtgttaggattacaggcgtgagccaccgcacccagcctcaataaacatttattagatattccttgtacttacccacattatagtacttacagtatgattaatagcttagcatctcatgagcatcgaacatacaggcatacagtaggtgcctgttaagcagtggtcattagtattaatgcatcagaatgctgtgatataagccaggcttctgtgagagtggggaggagggaggcgtggccaccagagaagcaggcacaaaaacgcactctaggggaaggagatccacctggaaacgcagcgtgtctttctttattgaccctggagggctggaccattggggattaggagtggtcgagtgtaccatttcaggaccttgtgttacctccccttcctccgctccatcctccctcaaccttctctggggaatgactgataactgatcctcaaccaaggtgccagtgacgataacagccaagtacagggctccctgggggtgcaaagtgcaaccttacgttggagaatgtgggtattggtgaaggtgaggggctagttctaaaggccttgggatcccctgcagccccagaatcctcatgctctcggcagttacacagttactcctgaaacaagagaaaaatcagcattatctagaactttctcccgtcagaatggaggtagcaggtacgtggagcccttctgagatgatttggagaaaggaaggcccagcctccagggacaactctcagcccacctggcaggacatggaggaagccaaaagctggactgtgtggcccccgcagggctcaaggaggtggagggtctggggcagcaagtgcttggtggtgggtacctctgtcctgcgtggcatccctgccatcaccctttggggctatgggagagcaagttgctgctggctggcccccgattacgggcctgggaaagcgagctaggagtccttcctcaccgccactgtgtgacaggtctgcatgaggaccctgtggggcacagagaacacagttcccaccaggtcgtggttggcccacaagcctcgggatccctccccagggttctctgaagctctctccatccctggcctgagtagccagacagcacctcctccaggaagccctcactgatttccctagttggtgcccaccctcagtgccccctcagtcctccatctgggcatgggtggttctggatctccactgctgctcacttgtctgtctctggccctcagctgatccatcttagaaccccagccctggacccactcgacgtatctctggcgccttgcacgtaatatgagctgagtggctatgcagcaaccaatgaacgagtgaatgagcgagtgaatgaatgagtcccctagctgtcagggcatggatcccccagcaaggagggggagacctgcaagggttaatcaggagcctgcctgtggtctgaggtaagcaaggagtgtatttgttcaggtaaataaggaaggattacttataatgggaaatcaggccctggccaactcttcatctcgcggctgtctgacttcctcccagcacattcctgcactctgccgtgtccacactgccccacagacccagtcctccaagcctgctgccagctccctgcaagcccctcaggttgggccttgccacggtgccagcaggcagccctgggctgggggtaggggactccctacaggcacgcagccctgagacctcagagggccaccccttgagggtggccaggcccccagtggccaacctgagtgctgcctctgccaccagccctgctggcccctggttccgctggccccccagatgcctggctgagacacgccagtggcctcagctgcccacacctcttcccggcccctgaagttggcactgcagcagacagctccctgggcaccaggcagctaacaggtgagtccaacaggaggtgggggtaccctggcatggggtctttccctgccagctggggggtgggcgactgcaggcaggacttggagggggcgcactttgccagctcagagctcatctcccagtcatcagtgaccctgtgacctggatccctttaccctcagaattccttgccccctcctcatgctccccagactgcctctctgggccaactctacatgctgggtgagcccccttgcccggcaaggcctggggtcccccacactgagcccagtctgcccagcctgaggggaggccgccgtgcagatgcagagccccggcccctgagacccagccagttctgcttggctggagaaacacaagcggcttgctgctgctgccaacccagctgctctgctgaggaaagggtctccctggtgccaggccaccagtgggcaggggcttgctggagcttgatgggtcagggctaagtctaaggccgggtccagttcgggacaggggagacaggtccagagcccagtagctgggctgggcagggatgggcacaggaaccagggggctggggtcaccgctgagcacacactctgagcccttggacactgggggaagctgagagccttgggtcctggtcttggcacacaaggaaagcaacagtagcagtacctcgaaggtgctcatttctaagatttgccagatttctgcggtggagagaggaagtgggtggtgggatgacagggtgggaagctgaagggcctgggcgactgggtgcccctgaggctggtggaggtgtgtgcgtgcgtgtgtgtgcgcggaagtatgtgtgtgtgtggtgtgtgcatgtgcgcgtgcgtgttgcatgtgcatgtgtgtgtgcgtgtgtgtgcatgttggggaggggcaggccaagatccctcacctcacctatcagctggggccgcccagcagcccacacccaggccatgagccccgcgtagcctgtgtcctttatgatggccatgggctttctcctcctcctcggccagggctgggacttgcctcatttcctgccgcaacctccccaataaagctgcatctccccatcaccagctgctcagctgagtaacaaagcaaacaggcgtccaggctgccccaggcccaagctggtgggcagggatggggaggagacgccccaccagacgggcaggcccaggccatggttcagccaggccagttgggctgagcttccctccacccacctgcaagaggggccagagccaaggacccccagcttggagtcccaccaccccaaactcacagacaaatggtggggggcattctcggagctcccaggcaggtggggctgtgtggaggaggtggtctcactgcgtaggggacccaccctcgcctttgagaggctgacagtgcatgtacaagcatttcctctgagtgaggccccgtgggggtatccagagctgaaaactaccagacttgcttattgcacactgtcagttgtaaaacactttggttttcacaaggaccctctgaattcgatagggcttctctgtcaaccaagtctgagggaatagggctgcactcagtaggtgctcagtcgatgctcagaaagtgtgatgctggcaggaagtgcaaaaaccgggagaacccactttttaccactgaggtcgttgtgagtataaagtgaatagccctgaaaccgttagagcagttttgtgctaaatgacttgttgcagcctgagtataacccggggaagttaatttagtctgacagggggacacagaccctcaaggtggagggcaagaaggaacaggtgaggtcccgccatgtgggaccgtgggcgggtcacttttcctcactgtacttgcaacaccttgtctgtgaaacaaggttagacaaggctattgcctgttaaagcaggcttcacggaggagacagcctggagcaggaccttgaaggctgtgtaggagttggatttgccagccggtctcctgggcgttggggggtggtggcgggtgcgggggccggggggaagtgggtggggcaggaattcttggttctggttcctcctagagggcagggagggtgggtgaagcctgcagctgcctggactgggctagagaacaggacagggccccagcctccctcaccaccatcctcagctccccccagactccactctctcgcccactccctctactccccatcaccttccgcttcttcctttgctccccggcttcctcaccccattccctctctctttcctcttctccagctgatcccctcacctgtgcccagggcccccctcatgtacactcaacccatcataaatgatttccattcaccctccatctcaatctccacaacccctttaagacatactcttgacagcccatttaacagacaagaaaaatgagcctcagagggggctgagtcactggccccagccccagagctagagagcagagagtcagggatcaaaccttttctgggaccctcccctggtccccacccccaccccgttcatgccccaccctgtgcccccagccaagcgagtggcctgtcaggtggaacaactcttcccaaagcaaactttgcacaagccgagttgccctgggctcttcctgacatttaatgccaagctccttctcctggctagtttgcatgttttcagcctgggaggtgccccctgccagattctgctctcccacctctcagcagccggggttgggggtgggtagaaaggggcctccagacttggggagggagaggctcatccttcctccccagccagggaccttagtgtgactctgctgggggtcggatgggaccgggacctccccaggattatgacggcgcaccaccaggataaagacccccctccttctccctctagctctggcacaggggagacgtggctggagggactgcccagcccggggctccagcgcctgagactggttgcggggcaaggcccaggcctctctgctcctggggtagcaagttgctttgagggctgctgggacctagctcctcctgccccaccctaccctctgtgccaggacaaaagggggatgtgtctctgctgacacttcacaggtgggaaccggtcctgataaccccttaataacccactcccacccatctcaaccttgtttgaagcaatttctgttcttagcctgtcaggacagttctttctggacttttctcatctgtgatgttggagtccttcactttgtcctaacacccctctccaagcctggaggtgtgctccagggcctgaggatcagggcgcaggaatgttttttcccttcagcccatcaagattttacagaccaacaaccaggtgtgtggagggcctctgccttccctggcctgtgctgggtctggaggggccgcagaaacacggcagatggagacagcagtcaccactgtggacacacacctctcgggagacagtgaagccttctcacatcgctgtcctgcctggtgacttcaaaatccagacacacagctgtctttatgagtccctgtttcactgctgaagaggctgaggccaagaggatcggccaaggggcctcaggcaggagcagcagagctccggtgacatccgtgtgttctcatgccctcaacgaccctgctgggcagggctgtggggagcaagagacccaggaaacctcacgacccctgtcctgtggcaagctgggaggtacggcgtatgcggggctggaggagggtagggaagagggaaggtactgtggccggcccttcaaggagtgtaccggcgatttgggggtgaggacgagactgtgccagagaggggcagccatgtgacccgggctgcatcatggcaaagcggggatgtgcaggtggtgggggtatggcagccttggtgtggctaagaggcctgacgggggcactgagaagtgaaatgtatttatatacacatgggctcaaccagggctgaaggaagacgtgaatggcaatttctggaaagccctgaaggttgagcggaattgtagttgctatggtgggaaactgggttctgtccccgccccgtcagcatgactcactgcaagccccaggtttgtctgggctggggtccctgctggctggaggaggcggggaggcactgctgctggggtgggagccaggcctgatgggcagctggtgaggtgcaggacagcctgaagctggctctgcttcttcagaagggtgggctgagtctttcagagcctccagacatcaactccagggacagccacacccctcatcctgccaaaagtgtcagctgtaaatggagtatgcctttgcttacaagggagccccaggtgtccacctctgcgtccccaccatccttctttaagtccccaaagccaggctgatggcaagatgagggtcatggatcgtaaaatccaggcagtgccagggctaacaaagtcctcagagatgacctggcctacagagcaggagactgagggctggagggaccagggactcacccagggtctctcctatggagggaacagggcagggtgtcacctgcacctcctgaagtggaggtcttcgttctttccagtccacatccccttttggagtaaactcagccacgatggtccacttggggctgcggtgggcctctgtacctccaggctgcgggcacctgtgctacccacaccccactaaggcaactgctgtggggctgggttggcaggtggcctgagcagaggcaaaggggatggtcaacaggggcaaccttaggagctagaagatgccgggtctgccagcaccagcagaaaggagggtggagccgagtcttgagttcgagtccctgctcactcacgcatggacaggtgccccgtagcaggtcacagcgcccttgtccgtcaagtgggaataatgctggctgccccagctgggagggcccggcaaagcagtttattcagtttgaccttcctcctgtcccagaaagcgctggaagtagtgccagtgagggtgtgtgtggacacccaggctgcccatgcagcagggcacagaggaggcttcactgatgcaatgtgttcctgctgcccgtgggaactgtgggaagagaaaaaccactgggttcccctggcgctccactttggcttccagtgccccgtcttcctgctacgtggccccgcccccagcttccacctgcctcccgccccacaaagcctcacccactcccctgtacttcccccaacagaccccagctcctgggcccactagctggctccccaaggtgaaactcacacagatcagggctcctgaagaagttgttagggggacagttggcctggacagttttgtgcccagaggaggtggggaaagcccggagatctagaagaaacccacctcgtctactcatgctgagtccaagacagcaagatctctctcactcagtcacctccctgctctcttcttctgcccttggagaccctggggaagcaggtgcttggagatggccacaatggggtgcttgagagagggcaggagctgctggcccgaggtggcagcctgggcccccttcctgggcagcggggtggtctgtccagcgggcagaagtggtgctctgggcagtgaatggagggccgtaaggaaggggtctggcacttctcttgggtccagctagtttgaagagcagtttgaagggtgaggttgcagcaaggtcctccctgtggaagggttggaggagcagagaaggggtgggaggaacagcagggcaagagagaggctggggccccaaggggatggggcagggcaggggtcagggtgtttggagaagccagacatgctactgcggctgggcctggtcatggctttggctgggacttcctgaggcctgggtagcccagcttttctccaaggtgctgaccagggcaggcccatgtggcccctgcccactctgcatggctcctggccaagacctggcctcacctccacagcccctgactccagcccatttaaggggacccagggacttggatggatggagggaggggctgacagacagctcagtaggccacatgggaaagccagaggaggtctgttccccatcagacctcttcctcctgcagtgaggccggctgggggctgagcagcagggccagagtggccatctctgtcactccctcagtgctcttctcaatggggactaaagctggggtcttgggctctgggcgggctggcattgggtctcaggattgaggtaggggtgaggatacatttaccccacaccaccatctccccaggaggtagggcctgagagccgggaccaagcaggatatggaagacaggctccaacccgcacagcgacctgggtccttagcaaacgcctcccaggtgactccattcccggaaactgtggttcgggagctgtcagggagggcatcttttgctgatgccagttggggtgtgggagtgaaaacctgggaggcaaagggttcaaggggcacatttctagccccgaggggtgagagtaggcagggtagtggcaggaaaagctgcactaaatctctccttttgggtccctctgctcactttccttaatcttccttcctgggggaatggaaggcgctgagagaaggggcccaaggtggctaatccccctggccgccaccccaccattctgctcctgtctctgggccttggcctccaccagctgttaccaaactttctttgtctggagtgggatctggggcctctggagcaggagggagccaggacacgctgagccttaatccagacatgtggcttaatccagaagagatcaactcgaggtttgggagctggaggcatcgctcaggagacggcagcccgtgggactggcaggccaaggctgcaggaacgctgggtcctgccatctgaggaccctggacatggcagacacctggcacgtcccaggacccttggcctacggagcagtggcctgagtgtcaggaggcctctggtctggccctggctgtgctgtgtgactgtgggcacctccctgccactctttgagcctgagcttttccagtgcacatgtgtccccatgggtggaccatcactgatggatttaatcctgggctgaattgcatggcacagatgaggcgagcctaggaagtcgcaggagggagctattagggagggctcgctggggcaggagggctttgggatgaattgtgatgagaaggaaagggcatcttagaaaatagccatgttgtgcccacagcacaggggcaggtatgaaatgccattctcattagagcttggatttgtggtcactatgtcaatccctggttctggtccggaccctgctgctaataagcacatgaatcccttccccactctgggcttcattgttcccattctatgaaacaatcacataatatatggccccttccagctctgattatctgggccaggtaggaggtagactcagaggtaggcaccagccactgggatggggcaatggggagccatgggagattcttgagcacaggggtgtctgatgaaagggtgctgcagggatatgaacagtggggtggaatgaagagccaagaggtggggacagactttagagcatcaaggagcccagtcaggaggtgggcagatcccctaggaagatgggactggccagagcatgcacctcagagagaatgtggtccagtgagcagaacccacacctggccaggaagaaccctggacaagctgcacagcctccctgagcctcactgtccgcatctataaagcagggctctggagtccacgtcaccctggctgtgggtaggaaagcgggtgatgtgggtgaaagcctgggcgtggcactggtgctcactgccaggggctcacagtgccgttctctcttcttccctcctgaggccagcccagaaccttgagacgcctagttgcaggttgggcacaccagccctggctgcctgaccagtaagccaagcccccctactctaggcctgggctgccttggggacggagcattccccaccacccctgatctgcagagagtcgaacctttcctccaaccacacagttaaccattaacttatttttcatcagggaagtgttggagctaggaccgaggcttggtggggagtagattccttggcatttaggtatagggcaaggtcaagctggaatgtggggtatagagggtgaaggagcccgagccaggagtcaaaagacctggatttggggatttacctctctgcaccttgacttccccattagcaaagtagggatgagaataagacctgggccagatgaggtagcttgtgcctataatcccagcagtttgggaggctgaagcagggggatcacttgagcccaggagttcgagaccagcctgggcaacatagtgagaccatgtctctacaacagattttaaaaattagccaggcatgatggcacacacctgtagtcccagctacttgggaggttgaaacaggaggatcacttgagcccaggaggtcgaggctgcagtgagccatgatcatgcccctgcactcgacagagcgagaccttatctcaaaaaaagagagagtaaggcctgtgctgcctttctcctggcaaggggatggatgtgagggcttcacatgcactcagcaaatgtgtcaaggatgtgtcattatatgccttcctggcaaaagctgccacctgccctgcccattcatccccaccgaccccacacaaccatgcctgaaacacagcagctgcctcctgtcctacctgtggctgaggccaagcaaacaggagggccacaagggaagcgagttctgcttcttggaaaagcttctgtctccctggcatggcgcccagggtgttggcagagactgtcctaacgtggcaggcatgggggctctggggatgtggacggggcaggaggcaggcagggggtgatgaaggaggggtggggggctgcgggggggggtccccaggggtggagccacctagcgggtagggcatgggcaccaggcagggtggggcccaggggcagagcgagctgttggcactgcctgagtaaataatgtgggcccacagcacacacgagtgtttgcacagaaggacttgaaatgattccaggtctgccctctgtcccccacatccccagccccgccttggtctctgcccaccccaccccaccctgacctttccttccttgtcacttaaaggagcccttgaatgggagagttgaaatcaaagggaacacccttccctcctgctggcattttctccaccacaggaagctgcagggctgccatgtaacactgggaaggttgggcactgcacaaggagggtgggcagaggaagctgaaattctacctaggctccattcgtcaagctatgctatccagggggaagggatgtcattttctgagttgtgtgaaattgaatgggctagctgtggccctaccgaagtggaggtgtcttccagactgggttctttcccttgtcccacctgcagaagcaaatgccagctgcatacggaggctgcgcgggtcagtctcacagggtaactggagatggatcagggagcccccttcccctcctgctgtcccagtagggcaccataaatgtcactgttagagaggatttcagtgctttgattaaagccttccccccaactggccagttacctttaaagcaaagatcctcaaatttgaacatgcacgagaatcacccagaggccagttaaaccagactgcggagtctcccccagagctgctgattcagtggctgtgaactgcctgagaattcaagtttctagcaagctccgaggtggcgctggttctgctggcccagacggcacatttggagaaccactgcttgaaactataaataaccctcgagaaaggacacaaattaacttgcccttaacaggtttatctgttcctttcctcctccctaactggttctctgtattattaggagcgtatatctgttggtaatcttctgcctctggcttgacgtattctttgtgtgtgtgtgcgtgtgttttgttttttttttcgagacggagttttgctctttcacccaggctggagtgcagtggcacgatctcggctcactgcagccgcctcctgggttcaagtgattctcctccctcagcctcccgagtagctgagacaggagaatcaggcacccaccaccttgcccagctaatttttgtatttttagtagggacagggtttcaccatgttggccaggctggtctcgaactcctggcctcaggtgatctgcccgcctcggcctcccaaagagctaggattacagtcacgagctactgcactgagcctgtcttgatgtattcttaagtctcaggcccccacatcactgccatcccagaatgtcctggggtttcagtgcttgcgcacctctccagtcccccttctcacccaaactgtgcactctgctattggtttcagggaaaagggcctgggcaaaaccaagccggggcggcccgtggggagcaaggcctctgactgcttgtgttgaggccagatggttcccccggagggccttggggcagcagtgaggagcaggtggctgagttgctaagggttttaggtgttccctggagccctgccccatctcacaaccaccctggctcctcctggaaagcctggcatgtggcactgcctccgggtggccgcatgctcctccaggcatcggggaaagtagagagcactgggagctggaaggggccctgggggcagcaccttctgagggagggtaaggggaggtgggtaccatgcacccagcctggggtattgggagacacacacctgtgagctcttgctcagtggccaccttgagagtgttgagtttacttagatcccccagatagccctgtgggagggcaagggctggcctactccccggcgtgtgggagggtttctaccccgccttgttcctctcgtctttcccctgctggtgaagatgatagccacctttaggatggtggcctctgcctgccacttccactcctatccttgtcaaaggcagaagaaaaacaagctttgctatatcaggaaagatttggacactgagggccccttgttcccacctcagtttgctcatccgccaaatggcgcaatcatgccttccattgtgagggctgaatgaggtcaggaacctcagaaggctgttttaagcacagtacatgtgtggagctttgctgctcccagccagcctggcttccttggggattgagggagcgatctatttctagtcctgcacccactcccacctcgctgtctttcccagccagaaggcctgtctgcccaaccatgtcgtggctgcccaatgacccggaagcccccaactctgtcccaggcccagcccactgtccacagggcccctcatccccataaccagcttagcggcccccacagggatggagaagcagtcaaacctgagtcctctttcatttccgtagacacagccgccagcccaaacagcagcggcatgggcagcgccagcccgggtctgagcagcgtatcccccagccacctcctgctgccccccgacacggtgtcgcggacaggcttggagaaggcggcagcgggggcagtgggtctcgagagacgggactggagtcccagtccacccgccacgcccgagcagggcctgtccgccttctacctctcctactttgacatgctgtaccctgaggacagcagctgggcagccaaggcccctggggccagcagtcgggaggagccacctgaggagcctgagcagtgcccggtcattgacagccaagccccagcgggcagcctggacttggtgcccggcgggctgaccttggaggagcactcgctggagcaggtgcagtccatggtggtgggcgaagtgctcaaggacatcgagacggcctgcaagctgctcaacatcaccgcaggtgagccctctccatgtgcctgcttccgtaagatgggtcacaggcaaggctgaggtcgctggggtgggtcggggcactgctggatggactctggccacctctggcccagcctcgggcagctttggggatgctggcacttctacacacagtcagctgtgagcctgggccaggaaggtttctgtccacctctagtgtcccaaccatgccagcctagggtccccactggtaggtgctggatgatatgaattcaagctctgtgtcccccacctcctcttggacttcgctctcccctcattcactctgctcccgccacactggcctgtttgctgttcccacaacatttgctacgctgctgcttcttcagcctagagcgctcttcccccaaatatctgtgtgactcacttccttcaggtcttggctcagatggcaccatccgcatgaggccttccctgacccctccattaaaattgctgcccatgagcacaggacatggtaaagaaaacaaacaaaaaaatgaaaaataaaagaaagaagaaaaatttctgctcacatccctacctgctgttctcacctgcttcctctcatagcacttacactcctcggacgtgccgcaccatatctgttgatctcgctcactctctgtgtcctccactagaatgtacactccacaaaggcagggattttcatttgttttgctcatcaatccatccccagatgctaggatagcaccttgaatataactgatgctcaatagacagttgttcaataataagcatttcttttttttttctttttcttctttttttttttttttttttttttttgagatggagtcttgctctgttgcccaggctgcagtgcagtggtgcaatctcggctcactcactgcaagctctgcctcccgggttcaagccattctcctgcctcagcctcccgagtagctgggactacaggcgcccgccaccacacccggctaatttttgtatttttagtagagacagggtttcaccgtgttagccaggatggtctcgatctcctgacctcgtgatctgcctgcctcggcctcccaaagtgctgggattactagcgtgagccaccgcgcccagcctcttcttttttttttttttttttttgacagggtctcgctctatcactgaggctggagtgcagtggtgtgatttcagctcactgcaacctctgcctctgggttcaagcgattctcctgcctcagcctcctgagaagctgggattacaggtgtctgccaccacaccctgctaatttttatatttttagtagagacggagttttcaccatgttggccaggctggtctcgaacttctgacctcaggtcatccgtctgccttggcctcccaaagtgctgggattacaggcatgagctacctctctgggccgaaaagcagttcctaatatgccaagccttattctaggacgggggaattgagtggtgaacacaacacagcccctgtgttcgtagggctgacatgatagtgagtgacacagatcacaaataaatagagaaatgtgtcactgttcttgtgggacggaaggccccgatgaggaggggacctcctagggcctggcatacatgtgtctgtcagccagacctggaaggcgtgattatggagctgatgctgtgggtggcggggctgctgagtctctagtcctctgtcctgctgtcgcctctccagcttcaggcagtcctgacccatgtccctcatcttcaggccctggcattgcagcactgaactctgtgcagctttccctgggaagcaggggtcttcatgcatccctcaggcccggcccctgcccccaaagctgccccgttgacgtcctcatttgaagctgctcctgccgatgccccaagtttcccaatgcccatgccaggccgactccaggagttctcccacagacctcctccccacccacagggctagggaggggagggccctgctccctcaacaatgggaacagaaacaaatggctttgacctcagggaggaaaatgggcttattaagtgggggcagcccagcctgcaggtcacccagctgggacactggctggaccatggtgttcacttggaggccccattgtgaccatgcccaccagcctatcccccacctataggcctatgaggctcaccccagagcagcaccccagggggacatctaggacctagccaagggctcccctcctggcctctggggcctgtggctgccccatggccaccctgtgccctgccatttacttattcaacacatgtgcctggagcagctcctgtgcgtctagccctttattccgtggaggacaaggggatggagtgccctgtgcctcagtttcctcatctgtaagatacaggggctggagagaatggtggggttctaagactaattcccaggtaggtgtttctctggttccttgaggggtttgggaaaggcaagaagtacctgatggagaagcccaggtgtttctggtagagtgtcactgtccctctagggctgaggctccctcgaaaggtcctttggagaggctggagggatctgggaggacccaaggcctgggtgaggcgggcagtacagatgcaccaggttaccctgccctgaaccaagttcattttttagggccctggttccttcctctcgccccactctcttcttgggtacccacttccacaggggccctcaggggcctgtctggggctgacctatccccatccccaagagcacatggtctcaggccacaggttcccatgggtgccccatcacagcagggtggtgctctcaggccacccctgagctgaggggatgcctcttgcccagatcccatggactggagccccagcaatgtgcagaagtggctcctgtggacagagcaccaataccggctgccccccatgggcaaggccttccaggagctggcgggcaaggagctgtgcgccatgtcggaggagcagttccgccagcgctcgcccctgggtggggatgtgctgcacgcccacctggacatctggaagtcaggtaggatgtggcatggctgggagcagcccctcccaggctccaagccagggacaggatgctggctaggaggttgccctctgctagggcagcagccccttggcccccaactggactccactctgaatctcagccccagtttcagctgcctcctggatcctggtgcactcttcaccccaacccactcccagccctggtcaaggccccagagctttgggacagagcacctgggaggttaaaaggtagaagtcagactgtgaggatgcaggatgtcagagctggggacaaccgtggatactaggaagtcctttttccttttaaaattttgtttgtttttctttgttttctttgtttttttttattaaagaagtaataaatgtgcatgttataaaatagaccacagtgaaaagtagtgtaccatgaacagtttccccctcccgctcccgacccccagcttccaatcccctccctagagggaaccactgttacaagtttcttgagtatctttccagggaaagtctatgaatactcgagcacatttacatatatgcagttcttattcttttttttttttttgacataagtagtagcagagtattacactgctctgcacaccacagtatgtcttgggtattgcccctgtccgtgtccacagtggccctgttttaattttagtttttgttttttgagacagggtctcactctattgcccaggctggagtacagtggcacagtcacagctcactatagcctcgacttccctgtttcattggatcctcccaccccaatctcctgagtagctgagtctacaggtgcaccaccacaccctgctaatttttgtattttttggtagagacgggttttcaccatgttggccaggctggtctcaaactcctgggcttgagcaatccacccacctcggcctcctgaagtgctgggactacaggcatgagcctccacgcccggcctgccctaaatttctaatggctgcgtgtcagcccctgagtgtctaaattgtcttgatctcagtgggcacccactgctgcctgcacagggccaggtgctttggaggaggtggtgcctgagtcaaggagtaagaaacaggaccaactcataggaccctgtcagagaccagtgccccgccccagcccaggcaagcccccatgtcagatgtcctcatctgaacaaggggttgcatgcaagccctttacggcccctcccagctctgaaatcctgaattttcttccaggaagcagcttcttgtaaccagcttgcctccccaggttggcaggaggcagggagccacaggggcaacccccagccacagaggggctcctgtggccccacagtcccacccaaacgcctcccctcctccaccctcggggcctctcctgggtccccaaccccctctccttgccctgcagcggcctggatgaaagagcggacttcacctggggcgattcactactgtggtgagccaggcagcggcagggtggaggcgggggctcgggtggggtggaggggtggctgccaatgaagccgggactggcctcccattcccactcaccgccaccctccctggccacccagcctcgaccagtgaggagagctggaccgacagcgaggtggactcatcatgctccgggcagcccatccacctgtggcagttcctcaaggagttgctactcaagccccacagctatggccgcttcattaggtggctcaacaaggagaagggtgagcagggtgcccaaggggcgctgcagggccagtgagcatggaggttgtgggggcttctgccaggcacggtgcatgggggcaggggcgggcagaggggtgaagctgatccccacctttgtcctagatgccaaatatgcagctctcatgggacagccctggggtctgtgtgcaatctgtgtccacatctgtctcctgctagactctgtctcacttaggagttttagtactgcacagcacctggaacgagctccaaatccactctccctccaccatctcatattaattaatcctgccagagagggctgcacaggccgaactgcctgagaatagcaaagaggttgtttcaggcttgggaactacagagacacctgtaatggggaagggatgctcttgccaagtgagccgtgggcactgctgggagccacacaggactttgcattaggtcatgcaaaccccacacagaagcaggagttggcaagggccaggcctgcagggccccagggaacccactaaggtacacaggctcacctgtaccgggaggtttgtgactccagagtattctctgccattcactggggcctgtggcacctgctttgcacacgtctctttaacctcaccgcaactacaccttgggagtaggcatttgggcccccacaccccgccccacccgagcagggggaggcctctgcacggggtcccttggttcgccacgaggctgacctggtggtctgcgtctttctccttcttgccacctcactcataccactggctctctcggggccctcctgctctaggcatcttcaaaattgaggactcagcccaggtggcccggctgtggggcatccgcaagaaccgtcccgccatgaactacgacaagctgagccgctccatccgccagtattacaagaagggcatcatccggaagccagacatctcccagcgcctcgtctaccagttcgtgcaccccatctgagtgcctggcccagggcctgaaacccgccctcaggggcctctctcctgcctgccctgcctcagccaggccctgagatgggggaaaacgggcagtctgctctgctgctctgaccttccagagcccaaggtcagggaggggcaaccaactgccccagggggatatgggtcctctggggccttcgggaccctggggcaggggtgcttcctcctcaggcccagctgctcccctggaggacagagggagacagggctgctccccaacacctgcctctgaccccagcatttccagagcagagcctacagaagggcagtgactcgacaaaggccacaggcagtccaggcctctctctgctccatccccctgcctcccattctgcaccacacctggcatggtgcagggagacatctgcacccctgagttgggcagccaggagtgcccccgggaatggataataaagatactagagaactgacatgtccccagtgtctgcgcagtgaatggcacagccccgaggtcatcaatggtcaaatgcggctgtggtcacagggcctggagtagtcaagggaggttttctggaggaggtggctttgggctgagcctaaagggcaagggataattgattggtagatgcttctgggagagagatagtgaggcttcaaaatcaaggaggggctagaacagccacctcatcttccctgtcgctgttcgggctgagaggcaggcggcaaggccggtgctaaagaggtgctacatgcaggaccggagtggggaaggcatctttcgcatccttttgctctgttgcagagcagggctttgcagctaacagggtggaagagaggttggttggctcctgtttatgtttcctgaaggcctcagcagtgctgtctgtgaagatgtgagctcctgtgagtgggtgtgagacccccgtgtgtgatgggaagagggtgtgcattggtgtctgtgggcatgctgggggtgaccaggacccaccacccactctcctgggcaaagcaactcatccagcttcctcccacttccctcacatttatcacccggctcagtgtccttatggtctactatgggctaggtgctttgtcatttatcttcccaacaaaactatgaagtaggggctactcccccattttgcagatgatgaaaccgaggctcagagtggttaagtgacttgcagatggtcacacagctgattgacagaataactcatacctgtctctccccaaggacagggctctctctgcccctccagccctccggctttctgaccgctcagcacccttggtcctctatcacccttatcctctgaggcctggcttccaggaaacagcaggggagccagcactatccagaccaccaagggttaaatgctaccctgtactgctgccttctgccctcagcaattttattgtcttcagaagaaagtttgctcctggcagtgagcaaatagcaccttggcatctgtcagctgggattgtactgcagggaggagggggccctgccccaggcctgtgcctcgctgggcccctgctgtgtctcactcccttgtaggaggagggtgggggggagactgggaccctggccagaaccaggctctgctgaactggttttgtctccagccagcctgccctgctcccaactgagtccctgcagacacttgcttgtatgtccccagctgggcctgggcctggaaaggcctcagatctcaggcaggggttggacaggaggataggtatggggagtagaggctaggagtacaaagctggagcagctctggaaagggtagatgtgggggcctgggtgaggcagctccctgcccatgaaccttggcaggcacacgcccatccagtgacaccttgtgagctggcagcgatctgcagatctccctcctccaaacacctccccagcagaaccccacctggctgggtattctctgacccttctccatgggaccccaccctcagggctccccatcactaaatggaacagcctgtgcaggtaagacaatacaacaatcttttgtctttatttgaagatttctctgtttggctaaaagcagggcttcacatagaggtaagtttggaggagtaaggaagatggggtggcaaatagattcaggaggagtaaggaagatggggtggcaaatagattcaatctccatctcaacctttctccctgcctggcacaccctgaggttgggggcaaggggtgtcagggaagggacaggggtatatttgccccgagtaatgggcttgtgtgac

SEQ ID NO: 3 - DNA, 1866 bp, Homo sapiens
aactcttcatctcgcggctgtctgacttcctcccagcacattcctgcactctgccgtgtccacactgccccacagacccagtcctccaagcctgctgccagctccctgcaagcccctcaggttgggccttgccacggtgccagcaggcagccctgggctgggggtaggggactccctacaggcacgcagccctgagacctcagagggccaccccttgagggtggccaggcccccagtggccaacctgagtgctgcctctgccaccagccctgctggcccctggttccgctggccccccagatgcctggctgagacacgccagtggcctcagctgcccacacctcttcccggcccctgaagttggcactgcagcagacagctccctgggcaccaggcagctaacagacacagccgccagcccaaacagcagcggcatgggcagcgccagcccgggtctgagcagcgtatcccccagccacctcctgctgccccccgacacggtgtcgcggacaggcttggagaaggcggcagcgggggcagtgggtctcgagagacgggactggagtcccagtccacccgccacgcccgagcagggcctgtccgccttctacctctcctactttgacatgctgtaccctgaggacagcagctgggcagccaaggcccctggggccagcagtcgggaggagccacctgaggagcctgagcagtgcccggtcattgacagccaagccccagcgggcagcctggacttggtgcccggcgggctgaccttggaggagcactcgctggagcaggtgcagtccatggtggtgggcgaagtgctcaaggacatcgagacggcctgcaagctgctcaacatcaccgcagatcccatggactggagccccagcaatgtgcagaagtggctcctgtggacagagcaccaataccggctgccccccatgggcaaggccttccaggagctggcgggcaaggagctgtgcgccatgtcggaggagcagttccgccagcgctcgcccctgggtggggatgtgctgcacgcccacctggacatctggaagtcagcctcgaccagtgaggagagctggaccgacagcgaggtggactcatcatgctccgggcagcccatccacctgtggcagttcctcaaggagttgctactcaagccccacagctatggccgcttcattaggtggctcaacaaggagaagggcatcttcaaaattgaggactcagcccaggtggcccggctgtggggcatccgcaagaaccgtcccgccatgaactacgacaagctgagccgctccatccgccagtattacaagaagggcatcatccggaagccagacatctcccagcgcctcgtctaccagttcgtgcaccccatctgagtgcctggcccagggcctgaaacccgccctcaggggcctctctcctgcctgccctgcctcagccaggccctgagatgggggaaaacgggcagtctgctctgctgctctgaccttccagagcccaaggtcagggaggggcaaccaactgccccagggggatatgggtcctctggggccttcgggaccctggggcaggggtgcttcctcctcaggcccagctgctcccctggaggacagagggagacagggctgctccccaacacctgcctctgaccccagcatttccagagcagagcctacagaagggcagtgactcgacaaaggccacaggcagtccaggcctctctctgctccatccccctgcctcccattctgcaccacacctggcatggtgcagggagacatctgcacccctgagttgggcagccaggagtgcccccgggaatggataataaagatactagagaactga

SEQ ID NO: 4 - DNA, 2358 bp, Homo sapiens
ccaccaggataaagacccccctccttctccctctagctctggcacaggggagacgtggctggagggactgcccagcccggggctccagcgcctgagactggttgcggggcaaggcccaggcctctctgctcctggggtagcaagttgctttgagggctgctgggacctagctcctcctgccccaccctaccctctgtgccaggacaaaagggggatgtgtctctgctgacacttcacaggtgggaaccggtcctgataaccccttaataacccactcccacccatctcaaccttgtttgaagcaatttctgttcttagcctgtcaggacagttctttctggacttttctcatctgtgatgttggagtccttcactttgtcctaacacccctctccaagcctggaggtgtgctccagggcctgaggatcagggcgcaggaatgttttttcccttcagcccatcaagattttacagaccaacaaccaggtgtgtggagggcctctgccttccctggcctgtgctgggtctggaggggccgcagaaacacggcagatggagacagcagtcaccactgtggacacacacctctcgggagacagtgaagccttctcacatcgctgtcctgcctggtgacttcaaaatccagacacacagctgtctttatgagtccctgtttcactgctgaagaggctgaggccaagaggatcggccaaggggcctcaggcaggagcagcagagctccggtgacatccgtgtgttctcatgccctcaacgaccctgctgggcagggctgtggggagcaagagacccaggaaacctcacgacccctgtcctgtggcaagctgggagacacagccgccagcccaaacagcagcggcatgggcagcgccagcccgggtctgagcagcgtatcccccagccacctcctgctgccccccgacacggtgtcgcggacaggcttggagaaggcggcagcgggggcagtgggtctcgagagacgggactggagtcccagtccacccgccacgcccgagcagggcctgtccgccttctacctctcctactttgacatgctgtaccctgaggacagcagctgggcagccaaggcccctggggccagcagtcgggaggagccacctgaggagcctgagcagtgcccggtcattgacagccaagccccagcgggcagcctggacttggtgcccggcgggctgaccttggaggagcactcgctggagcaggtgcagtccatggtggtgggcgaagtgctcaaggacatcgagacggcctgcaagctgctcaacatcaccgcagatcccatggactggagccccagcaatgtgcagaagtggctcctgtggacagagcaccaataccggctgccccccatgggcaaggccttccaggagctggcgggcaaggagctgtgcgccatgtcggaggagcagttccgccagcgctcgcccctgggtggggatgtgctgcacgcccacctggacatctggaagtcagcggcctggatgaaagagcggacttcacctggggcgattcactactgtgcctcgaccagtgaggagagctggaccgacagcgaggtggactcatcatgctccgggcagcccatccacctgtggcagttcctcaaggagttgctactcaagccccacagctatggccgcttcattaggtggctcaacaaggagaagggcatcttcaaaattgaggactcagcccaggtggcccggctgtggggcatccgcaagaaccgtcccgccatgaactacgacaagctgagccgctccatccgccagtattacaagaagggcatcatccggaagccagacatctcccagcgcctcgtctaccagttcgtgcaccccatctgagtgcctggcccagggcctgaaacccgccctcaggggcctctctcctgcctgccctgcctcagccaggccctgagatgggggaaaacgggcagtctgctctgctgctctgaccttccagagcccaaggtcagggaggggcaaccaactgccccagggggatatgggtcctctggggccttcgggaccctggggcaggggtgcttcctcctcaggcccagctgctcccctggaggacagagggagacagggctgctccccaacacctgcctctgaccccagcatttccagagcagagcctacagaagggcagtgactcgacaaaggccacaggcagtccaggcctctctctgctccatccccctgcctcccattctgcaccacacctggcatggtgcagggagacatctgcacccctgagttgggcagccaggagtgcccccgggaatggataataaagatactagagaactga

SEQ ID NO: 5 - DNA, 1552 bp, Homo sapiens
tgccaggacaaaagggggatgtgtctctgctgacacttcacagacacagccgccagcccaaacagcagcggcatgggcagcgccagcccgggtctgagcagcgtatcccccagccacctcctgctgccccccgacacggtgtcgcggacaggcttggagaaggcggcagcgggggcagtgggtctcgagagacgggactggagtcccagtccacccgccacgcccgagcagggcctgtccgccttctacctctcctactttgacatgctgtaccctgaggacagcagctgggcagccaaggcccctggggccagcagtcgggaggagccacctgaggagcctgagcagtgcccggtcattgacagccaagccccagcgggcagcctggacttggtgcccggcgggctgaccttggaggagcactcgctggagcaggtgcagtccatggtggtgggcgaagtgctcaaggacatcgagacggcctgcaagctgctcaacatcaccgcagatcccatggactggagccccagcaatgtgcagaagtggctcctgtggacagagcaccaataccggctgccccccatgggcaaggccttccaggagctggcgggcaaggagctgtgcgccatgtcggaggagcagttccgccagcgctcgcccctgggtggggatgtgctgcacgcccacctggacatctggaagtcagcggcctggatgaaagagcggacttcacctggggcgattcactactgtgcctcgaccagtgaggagagctggaccgacagcgaggtggactcatcatgctccgggcagcccatccacctgtggcagttcctcaaggagttgctactcaagccccacagctatggccgcttcattaggtggctcaacaaggagaagggcatcttcaaaattgaggactcagcccaggtggcccggctgtggggcatccgcaagaaccgtcccgccatgaactacgacaagctgagccgctccatccgccagtattacaagaagggcatcatccggaagccagacatctcccagcgcctcgtctaccagttcgtgcaccccatctgagtgcctggcccagggcctgaaacccgccctcaggggcctctctcctgcctgccctgcctcagccaggccctgagatgggggaaaacgggcagtctgctctgctgctctgaccttccagagcccaaggtcagggaggggcaaccaactgccccagggggatatgggtcctctggggccttcgggaccctggggcaggggtgcttcctcctcaggcccagctgctcccctggaggacagagggagacagggctgctccccaacacctgcctctgaccccagcatttccagagcagagcctacagaagggcagtgactcgacaaaggccacaggcagtccaggcctctctctgctccatccccctgcctcccattctgcaccacacctggcatggtgcagggagacatctgcacccctgagttgggcagccaggagtgcccccgggaatggataataaagatactagagaactga

SEQ ID NO: 6 - DNA, 20 bp, Artificial sequence
  Primer
cgcttcattaggtggctcaa

SEQ ID NO: 7 - DNA, 20 bp, Artificial sequence
  Primer
gctcagcttgtcgtagttca

SEQ ID NO: 8 - DNA, 23 bp, Artificial sequence
  Probe
aattgaggactcagcccaggtgg

SEQ ID NO: 9 - DNA, 20 bp, Artificial sequence
  Primer
aagtgctcaaggacatcgag

SEQ ID NO: 10 - DNA, 19 bp, Artificial sequence
  Primer
cggtattggtgctctgtcc

SEQ ID NO: 11 - DNA, 23 bp, Artificial sequence
  Probe
tccatgggatctgcggtgatgtt

SEQ ID NO: 12 - DNA, 17 bp, Artificial sequence
  Primer
gccatggagcgctttgg

SEQ ID NO: 13 - DNA, 22 bp, Artificial sequence
  Primer
tccacagtcagcaatggtgatc

SEQ ID NO: 14 - DNA, 25 bp, Artificial sequence
  Probe
tccaggaatggcaagaccagcaaga

SEQ ID NO: 15 - DNA, 16 bp, Artificial sequence
  Synthetic oligonucleotide
actggcggatggagcg

SEQ ID NO: 16 - DNA, 16 bp, Artificial sequence
  Synthetic oligonucleotide
tcttgtaatactggcg

SEQ ID NO: 17 - DNA, 16 bp, Artificial sequence
  Synthetic oligonucleotide
acatgtctggattaag

SEQ ID NO: 18 - DNA, 16 bp, Artificial sequence
  Synthetic oligonucleotide
agtcagacagccgcga

SEQ ID NO: 19 - DNA, 16 bp, Artificial sequence
  Synthetic oligonucleotide
ggacacggcagagtgc

SEQ ID NO: 20 - DNA, 16 bp, Artificial sequence
  Synthetic oligonucleotide
cttggaggactgggtc

SEQ ID NO: 21 - DNA, 16 bp, Artificial sequence
  Synthetic oligonucleotide
caccgtggcaaggccc

SEQ ID NO: 22 - DNA, 16 bp, Artificial sequence
  Synthetic oligonucleotide
cctgtagggagtcccc

SEQ ID NO: 23 - DNA, 16 bp, Artificial sequence
  Synthetic oligonucleotide
gccagcggaaccaggg

SEQ ID NO: 24 - DNA, 16 bp, Artificial sequence
  Synthetic oligonucleotide
ctgttagctgcctggt

SEQ ID NO: 25 - DNA, 16 bp, Artificial sequence
  Synthetic oligonucleotide
cgctgctgtttgggct

SEQ ID NO: 26 - DNA, 16 bp, Artificial sequence
  Synthetic oligonucleotide
cgctgctcagacccgg

SEQ ID NO: 27 - DNA, 16 bp, Artificial sequence
  Synthetic oligonucleotide
gcctgtccgcgacacc

SEQ ID NO: 28 - DNA, 16 bp, Artificial sequence
  Synthetic oligonucleotide
ccgtctctcgagaccc

SEQ ID NO: 29 - DNA, 16 bp, Artificial sequence
  Synthetic oligonucleotide
ggtggactgggactcc

SEQ ID NO: 30 - DNA, 16 bp, Artificial sequence
  Synthetic oligonucleotide
gaggtagaaggcggac

SEQ ID NO: 31 - DNA, 16 bp, Artificial sequence
  Synthetic oligonucleotide
cagggtacagcatgtc

SEQ ID NO: 32 - DNA, 16 bp, Artificial sequence
  Synthetic oligonucleotide
gtggctcctcccgact

SEQ ID NO: 33 - DNA, 16 bp, Artificial sequence
  Synthetic oligonucleotide
ctgtcaatgaccgggc

SEQ ID NO: 34 - DNA, 16 bp, Artificial sequence
  Synthetic oligonucleotide
cagcccgccgggcacc

SEQ ID NO: 35 - DNA, 16 bp, Artificial sequence
  Synthetic oligonucleotide
ctccagcgagtgctcc

SEQ ID NO: 36 - DNA, 16 bp, Artificial sequence
  Synthetic oligonucleotide
cttcgcccaccaccat

SEQ ID NO: 37 - DNA, 16 bp, Artificial sequence
  Synthetic oligonucleotide
ccgtctcgatgtcctt

SEQ ID NO: 38 - DNA, 16 bp, Artificial sequence
  Synthetic oligonucleotide
tgcggtgatgttgagc

SEQ ID NO: 39 - DNA, 16 bp, Artificial sequence
  Synthetic oligonucleotide
ggctccagtccatggg

SEQ ID NO: 40 - DNA, 16 bp, Artificial sequence
  Synthetic oligonucleotide
gggcagccggtattgg

SEQ ID NO: 41 - DNA, 16 bp, Artificial sequence
  Synthetic oligonucleotide
tgctcctccgacatgg

SEQ ID NO: 42 - DNA, 16 bp, Artificial sequence
  Synthetic oligonucleotide
tgacttccagatgtcc

SEQ ID NO: 43 - DNA, 16 bp, Artificial sequence
  Synthetic oligonucleotide
ggtgaagtccgctctt

SEQ ID NO: 44 - DNA, 16 bp, Artificial sequence
  Synthetic oligonucleotide
acagtagtgaatcgcc

SEQ ID NO: 45 - DNA, 16 bp, Artificial sequence
  Synthetic oligonucleotide
gtcggtccagctctcc

SEQ ID NO: 46 - DNA, 16 bp, Artificial sequence
  Synthetic oligonucleotide
gcatgatgagtccacc

SEQ ID NO: 47 - DNA, 16 bp, Artificial sequence
  Synthetic oligonucleotide
ggtggatgggctgccc

SEQ ID NO: 48 - DNA, 16 bp, Artificial sequence
  Synthetic oligonucleotide
cttgagtagcaactcc

SEQ ID NO: 49 - DNA, 16 bp, Artificial sequence
  Synthetic oligonucleotide
cacctaatgaagcggc

SEQ ID NO: 50 - DNA, 16 bp, Artificial sequence
  Synthetic oligonucleotide
ggctgagtcctcaatt

SEQ ID NO: 51 - DNA, 16 bp, Artificial sequence
  Synthetic oligonucleotide
gacggttcttgcggat

SEQ ID NO: 52 - DNA, 16 bp, Artificial sequence
  Synthetic oligonucleotide
gcggctcagcttgtcg

SEQ ID NO: 53 - DNA, 16 bp, Artificial sequence
  Synthetic oligonucleotide
gatgcccttcttgtaa

SEQ ID NO: 54 - DNA, 16 bp, Artificial sequence
  Synthetic oligonucleotide
tgggagatgtctggct

SEQ ID NO: 55 - DNA, 16 bp, Artificial sequence
  Synthetic oligonucleotide
gggtgcacgaactggt

SEQ ID NO: 56 - DNA, 16 bp, Artificial sequence
  Synthetic oligonucleotide
ggcagttggttgcccc

SEQ ID NO: 57 - DNA, 16 bp, Artificial sequence
  Synthetic oligonucleotide
cagggtcccgaaggcc

SEQ ID NO: 58 - DNA, 16 bp, Artificial sequence
  Synthetic oligonucleotide
gtcgagtcactgccct

SEQ ID NO: 59 - DNA, 16 bp, Artificial sequence
  Synthetic oligonucleotide
gtgtggtgcagaatgg

SEQ ID NO: 60 - DNA, 16 bp, Artificial sequence
  Synthetic oligonucleotide
cagagacacatccccc

SEQ ID NO: 61 - DNA, 16 bp, Artificial sequence
  Synthetic oligonucleotide
gcacggcggcctcccc

SEQ ID NO: 62 - DNA, 16 bp, Artificial sequence
  Synthetic oligonucleotide
gggcacccagtcgccc

SEQ ID NO: 63 - DNA, 16 bp, Artificial sequence
  Synthetic oligonucleotide
gggtccttggctctgg

SEQ ID NO: 64 - DNA, 16 bp, Artificial sequence
  Synthetic oligonucleotide
gtccccctgtcagact

SEQ ID NO: 65 - DNA, 16 bp, Artificial sequence
  Synthetic oligonucleotide
gggcgagagagtggag

SEQ ID NO: 66 - DNA, 16 bp, Artificial sequence
  Synthetic oligonucleotide
atcctggtggtgcgcc

SEQ ID NO: 67 - DNA, 16 bp, Artificial sequence
  Synthetic oligonucleotide
tgcggcccctccagac

SEQ ID NO: 68 - DNA, 16 bp, Artificial sequence
  Synthetic oligonucleotide
tgaagggccggccaca

SEQ ID NO: 69 - DNA, 16 bp, Artificial sequence
  Synthetic oligonucleotide
cagtgcctccccgcct

SEQ ID NO: 70 - DNA, 16 bp, Artificial sequence
  Synthetic oligonucleotide
ggtgagtccctggtcc

SEQ ID NO: 71 - DNA, 16 bp, Artificial sequence
  Synthetic oligonucleotide
gcactacttccagcgc

SEQ ID NO: 72 - DNA, 16 bp, Artificial sequence
  Synthetic oligonucleotide
tctccgggctttcccc

SEQ ID NO: 73 - DNA, 16 bp, Artificial sequence
  Synthetic oligonucleotide
gggctacccaggcctc

SEQ ID NO: 74 - DNA, 16 bp, Artificial sequence
  Synthetic oligonucleotide
atgtatcctcacccct

SEQ ID NO: 75 - DNA, 16 bp, Artificial sequence
  Synthetic oligonucleotide
ccccagcgagccctcc

SEQ ID NO: 76 - DNA, 16 bp, Artificial sequence
  Synthetic oligonucleotide
gcggacagtgaggctc

SEQ ID NO: 77 - DNA, 16 bp, Artificial sequence
  Synthetic oligonucleotide
gactcctggctcgggc

SEQ ID NO: 78 - DNA, 16 bp, Artificial sequence
  Synthetic oligonucleotide
cccttgtggccctcct

SEQ ID NO: 79 - DNA, 16 bp, Artificial sequence
  Synthetic oligonucleotide
tccccctggatagcat

SEQ ID NO: 80 - DNA, 16 bp, Artificial sequence
  Synthetic oligonucleotide
cgtcaagccagaggca

SEQ ID NO: 81 - DNA, 16 bp, Artificial sequence
  Synthetic oligonucleotide
tggtacccacctcccc

SEQ ID NO: 82 - DNA, 16 bp, Artificial sequence
  Synthetic oligonucleotide
ggcggctgtgtctacg

SEQ ID NO: 83 - DNA, 16 bp, Artificial sequence
  Synthetic oligonucleotide
gctcatgggcagcaat

SEQ ID NO: 84 - DNA, 16 bp, Artificial sequence
  Synthetic oligonucleotide
ctgcaatgccagggcc

SEQ ID NO: 85 - DNA, 16 bp, Artificial sequence
  Synthetic oligonucleotide
gcccttggctaggtcc

SEQ ID NO: 86 - DNA, 16 bp, Artificial sequence
  Synthetic oligonucleotide
gggcccctgtggaagt

SEQ ID NO: 87 - DNA, 16 bp, Artificial sequence
  Synthetic oligonucleotide
ggccttgaccagggct

SEQ ID NO: 88 - DNA, 16 bp, Artificial sequence
  Synthetic oligonucleotide
ggcttgcatgcaaccc

SEQ ID NO: 89 - DNA, 16 bp, Artificial sequence
  Synthetic oligonucleotide
gtcgaggctgggtggc

SEQ ID NO: 90 - DNA, 16 bp, Artificial sequence
  Synthetic oligonucleotide
attctcaggcagttcg

SEQ ID NO: 91 - DNA, 16 bp, Artificial sequence
  Synthetic oligonucleotide
gggccccgagagagcc

SEQ ID NO: 92 - DNA, 16 bp, Artificial sequence
  Synthetic oligonucleotide
tgcaggaatgtgctgg

SEQ ID NO: 93 - DNA, 16 bp, Artificial sequence
  Synthetic oligonucleotide
cccgtccacatcccca

SEQ ID NO: 94 - DNA, 16 bp, Artificial sequence
  Synthetic oligonucleotide
ccgctgacttccagat

SEQ ID NO: 95 - DNA, 16 bp, Artificial sequence
  Synthetic oligonucleotide
atactggcggatggag

SEQ ID NO: 96 - DNA, 16 bp, Artificial sequence
  Synthetic oligonucleotide
gtggacacggcagagt

SEQ ID NO: 97 - DNA, 16 bp, Artificial sequence
  Synthetic oligonucleotide
ggcttggaggactggg

SEQ ID NO: 98 - DNA, 16 bp, Artificial sequence
  Synthetic oligonucleotide
ggcaccgtggcaaggc

SEQ ID NO: 99 - DNA, 16 bp, Artificial sequence
  Synthetic oligonucleotide
cgtgcctgtagggagt

SEQ ID NO: 100 - DNA, 16 bp, Artificial sequence
  Synthetic oligonucleotide
gggccagcggaaccag

SEQ ID NO: 101 - DNA, 16 bp, Artificial sequence
  Synthetic oligonucleotide
ggctgtgtctgttagc

SEQ ID NO: 102 - DNA, 16 bp, Artificial sequence
  Synthetic oligonucleotide
tgccgctgctgtttgg

SEQ ID NO: 103 - DNA, 16 bp, Artificial sequence
  Synthetic oligonucleotide
atacgctgctcagacc

SEQ ID NO: 104 - DNA, 16 bp, Artificial sequence
  Synthetic oligonucleotide
aagcctgtccgcgaca

SEQ ID NO: 105 - DNA, 16 bp, Artificial sequence
  Synthetic oligonucleotide
gtcccgtctctcgaga

SEQ ID NO: 106 - DNA, 16 bp, Artificial sequence
  Synthetic oligonucleotide
cgtggcgggtggactg

SEQ ID NO: 107 - DNA, 16 bp, Artificial sequence
  Synthetic oligonucleotide
ggagaggtagaaggcg

SEQ ID NO: 108 - DNA, 16 bp, Artificial sequence
  Synthetic oligonucleotide
cctcagggtacagcat

SEQ ID NO: 109 - DNA, 16 bp, Artificial sequence
  Synthetic oligonucleotide
cctcaggtggctcctc

SEQ ID NO: 110 - DNA, 16 bp, Artificial sequence
  Synthetic oligonucleotide
ggctgtcaatgaccgg

SEQ ID NO: 111 - DNA, 16 bp, Artificial sequence
  Synthetic oligonucleotide
ggtcagcccgccgggc

SEQ ID NO: 112 - DNA, 16 bp, Artificial sequence
  Synthetic oligonucleotide
ctgctccagcgagtgc

SEQ ID NO: 113 - DNA, 16 bp, Artificial sequence
  Synthetic oligonucleotide
gagcacttcgcccacc

SEQ ID NO: 114 - DNA, 16 bp, Artificial sequence
  Synthetic oligonucleotide
ggccgtctcgatgtcc

SEQ ID NO: 115 - DNA, 16 bp, Artificial sequence
  Synthetic oligonucleotide
atctgcggtgatgttg

SEQ ID NO: 116 - DNA, 16 bp, Artificial sequence
  Synthetic oligonucleotide
tctgtccacaggagcc

SEQ ID NO: 117 - DNA, 16 bp, Artificial sequence
  Synthetic oligonucleotide
ctccttgcccgccagc

SEQ ID NO: 118 - DNA, 16 bp, Artificial sequence
  Synthetic oligonucleotide
aactgctcctccgaca

SEQ ID NO: 119 - DNA, 16 bp, Artificial sequence
  Synthetic oligonucleotide
caggtgaagtccgctc

SEQ ID NO: 120 - DNA, 16 bp, Artificial sequence
  Synthetic oligonucleotide
ggcacagtagtgaatc

SEQ ID NO: 121 - DNA, 16 bp, Artificial sequence
  Synthetic oligonucleotide
cgctgtcggtccagct

SEQ ID NO: 122 - DNA, 16 bp, Artificial sequence
  Synthetic oligonucleotide
ggagcatgatgagtcc

SEQ ID NO: 123 - DNA, 16 bp, Artificial sequence
  Synthetic oligonucleotide
ccacaggtggatgggc

SEQ ID NO: 124 - DNA, 16 bp, Artificial sequence
  Synthetic oligonucleotide
ggcttgagtagcaact

SEQ ID NO: 125 - DNA, 16 bp, Artificial sequence
  Synthetic oligonucleotide
gccacctaatgaagcg

SEQ ID NO: 126 - DNA, 16 bp, Artificial sequence
  Synthetic oligonucleotide
ccccacagccgggcca

SEQ ID NO: 127 - DNA, 16 bp, Artificial sequence
  Synthetic oligonucleotide
gggacggttcttgcgg

SEQ ID NO: 128 - DNA, 16 bp, Artificial sequence
  Synthetic oligonucleotide
agcggctcagcttgtc

SEQ ID NO: 129 - DNA, 16 bp, Artificial sequence
  Synthetic oligonucleotide
gatgatgcccttcttg

SEQ ID NO: 130 - DNA, 16 bp, Artificial sequence
  Synthetic oligonucleotide
gcgctgggagatgtct

SEQ ID NO: 131 - DNA, 16 bp, Artificial sequence
  Synthetic oligonucleotide
ggcgggtttcaggccc

SEQ ID NO: 132 - DNA, 16 bp, Artificial sequence
  Synthetic oligonucleotide
cccatatccccctggg

SEQ ID NO: 133 - DNA, 16 bp, Artificial sequence
  Synthetic oligonucleotide
gccccagggtcccgaa

SEQ ID NO: 134 - DNA, 16 bp, Artificial sequence
  Synthetic oligonucleotide
ggcctttgtcgagtca

SEQ ID NO: 135 - DNA, 16 bp, Artificial sequence
  Synthetic oligonucleotide
gcagatgtctccctgc

SEQ ID NO: 136 - DNA, 16 bp, Artificial sequence
  Synthetic oligonucleotide
gtgaagtgtcagcaga

SEQ ID NO: 137 - DNA, 16 bp, Artificial sequence
  Synthetic oligonucleotide
agctgggttggcagca

SEQ ID NO: 138 - DNA, 16 bp, Artificial sequence
  Synthetic oligonucleotide
cgcacgcgcacatgca

SEQ ID NO: 139 - DNA, 16 bp, Artificial sequence
  Synthetic oligonucleotide
ccgagaatgcccccca

SEQ ID NO: 140 - DNA, 16 bp, Artificial sequence
  Synthetic oligonucleotide
cccgcccacggtccca

SEQ ID NO: 141 - DNA, 16 bp, Artificial sequence
  Synthetic oligonucleotide
agtgactcagccccct

SEQ ID NO: 142 - DNA, 16 bp, Artificial sequence
  Synthetic oligonucleotide
tggagccccgggctgg

SEQ ID NO: 143 - DNA, 16 bp, Artificial sequence
  Synthetic oligonucleotide
gtctcccgagaggtgt

SEQ ID NO: 144 - DNA, 16 bp, Artificial sequence
  Synthetic oligonucleotide
gcccgggtcacatggc

SEQ ID NO: 145 - DNA, 16 bp, Artificial sequence
  Synthetic oligonucleotide
gtcctgcacctcacca

SEQ ID NO: 146 - DNA, 16 bp, Artificial sequence
  Synthetic oligonucleotide
ggtgcaggtgacaccc

SEQ ID NO: 147 - DNA, 16 bp, Artificial sequence
  Synthetic oligonucleotide
tcccacgggcagcagg

SEQ ID NO: 148 - DNA, 16 bp, Artificial sequence
  Synthetic oligonucleotide
gaccaccccgctgccc

SEQ ID NO: 149 - DNA, 16 bp, Artificial sequence
  Synthetic oligonucleotide
ggccaggtcttggcca

SEQ ID NO: 150 - DNA, 16 bp, Artificial sequence
  Synthetic oligonucleotide
ggtcccggctctcagg

SEQ ID NO: 151 - DNA, 16 bp, Artificial sequence
  Synthetic oligonucleotide
gtcccacgggctgccg

SEQ ID NO: 152 - DNA, 16 bp, Artificial sequence
  Synthetic oligonucleotide
tgcccctgtgctgtgg

SEQ ID NO: 153 - DNA, 16 bp, Artificial sequence
  Synthetic oligonucleotide
agtgccacgcccaggc

SEQ ID NO: 154 - DNA, 16 bp, Artificial sequence
  Synthetic oligonucleotide
ggcccaggtcttattc

SEQ ID NO: 155 - DNA, 16 bp, Artificial sequence
  Synthetic oligonucleotide
ggccacagctagccca

SEQ ID NO: 156 - DNA, 16 bp, Artificial sequence
  Synthetic oligonucleotide
gggtgcctgattctcc

SEQ ID NO: 157 - DNA, 16 bp, Artificial sequence
  Synthetic oligonucleotide
tcccacagggctatct

SEQ ID NO: 158 - DNA, 16 bp, Artificial sequence
  Synthetic oligonucleotide
tcacctgcggtgatgt

SEQ ID NO: 159 - DNA, 16 bp, Artificial sequence
  Synthetic oligonucleotide
gatatggtgcggcacg

SEQ ID NO: 160 - DNA, 16 bp, Artificial sequence
  Synthetic oligonucleotide
ggcctgagggatgcat

SEQ ID NO: 161 - DNA, 16 bp, Artificial sequence
  Synthetic oligonucleotide
acatgtgttgaataag

SEQ ID NO: 162 - DNA, 16 bp, Artificial sequence
  Synthetic oligonucleotide
tgggaacctgtggcct

SEQ ID NO: 163 - DNA, 16 bp, Artificial sequence
  Synthetic oligonucleotide
cacggttgtccccagc

SEQ ID NO: 164 - DNA, 16 bp, Artificial sequence
  Synthetic oligonucleotide
gggaggcaagctggtt

SEQ ID NO: 165 - DNA, 16 bp, Artificial sequence
  Synthetic oligonucleotide
cgccccttgggcaccc

SEQ ID NO: 166 - DNA, 16 bp, Artificial sequence
  Synthetic oligonucleotide
tattctcaggcagttc

SEQ ID NO: 167 - DNA, 16 bp, Artificial sequence
  Synthetic oligonucleotide
gggacatgtcagttct

SEQ ID NO: 168 - DNA, 16 bp, Artificial sequence
  Synthetic oligonucleotide
atccaggccgctgact

SEQ ID NO: 169 - DNA, 16 bp, Artificial sequence
  Synthetic oligonucleotide
gcggccatagctgtgg

SEQ ID NO: 170 - DNA, 16 bp, Artificial sequence
  Synthetic oligonucleotide
taatactggcggatgg

SEQ ID NO: 171 - DNA, 16 bp, Artificial sequence
  Synthetic oligonucleotide
ccgcgagatgaagagt

SEQ ID NO: 172 - DNA, 16 bp, Artificial sequence
  Synthetic oligonucleotide
gagtgcaggaatgtgc

SEQ ID NO: 173 - DNA, 16 bp, Artificial sequence
  Synthetic oligonucleotide
cagtgtggacacggca

SEQ ID NO: 174 - DNA, 16 bp, Artificial sequence
  Synthetic oligonucleotide
cagcaggcttggagga

SEQ ID NO: 175 - DNA, 16 bp, Artificial sequence
  Synthetic oligonucleotide
tgctggcaccgtggca

SEQ ID NO: 176 - DNA, 16 bp, Artificial sequence
  Synthetic oligonucleotide
tcaggttggccactgg

SEQ ID NO: 177 - DNA, 16 bp, Artificial sequence
  Synthetic oligonucleotide
gccgggaagaggtgtg

SEQ ID NO: 178 - DNA, 16 bp, Artificial sequence
  Synthetic oligonucleotide
ggcggctgtgtctgtt

SEQ ID NO: 179 - DNA, 16 bp, Artificial sequence
  Synthetic oligonucleotide
catgccgctgctgttt

SEQ ID NO: 180 - DNA, 16 bp, Artificial sequence
  Synthetic oligonucleotide
gggatacgctgctcag

SEQ ID NO: 181 - DNA, 16 bp, Artificial sequence
  Synthetic oligonucleotide
ctccaagcctgtccgc

SEQ ID NO: 182 - DNA, 16 bp, Artificial sequence
  Synthetic oligonucleotide
ctccagtcccgtctct

SEQ ID NO: 183 - DNA, 16 bp, Artificial sequence
  Synthetic oligonucleotide
caggccctgctcgggc

SEQ ID NO: 184 - DNA, 16 bp, Artificial sequence
  Synthetic oligonucleotide
agtaggagaggtagaa

SEQ ID NO: 185 - DNA, 16 bp, Artificial sequence
  Synthetic oligonucleotide
gtcctcagggtacagc

SEQ ID NO: 186 - DNA, 16 bp, Artificial sequence
  Synthetic oligonucleotide
gctcaggctcctcagg

SEQ ID NO: 187 - DNA, 16 bp, Artificial sequence
  Synthetic oligonucleotide
ggcttggctgtcaatg

SEQ ID NO: 188 - DNA, 16 bp, Artificial sequence
  Synthetic oligonucleotide
caaggtcagcccgccg

SEQ ID NO: 189 - DNA, 16 bp, Artificial sequence
  Synthetic oligonucleotide
acctgctccagcgagt

SEQ ID NO: 190 - DNA, 16 bp, Artificial sequence
  Synthetic oligonucleotide
cttgagcacttcgccc

SEQ ID NO: 191 - DNA, 16 bp, Artificial sequence
  Synthetic oligonucleotide
gcaggccgtctcgatg

SEQ ID NO: 192 - DNA, 16 bp, Artificial sequence
  Synthetic oligonucleotide
gggatctgcggtgatg

SEQ ID NO: 193 - DNA, 16 bp, Artificial sequence
  Synthetic oligonucleotide
tattggtgctctgtcc

SEQ ID NO: 194 - DNA, 16 bp, Artificial sequence
  Synthetic oligonucleotide
agctccttgcccgcca

SEQ ID NO: 195 - DNA, 16 bp, Artificial sequence
  Synthetic oligonucleotide
gcggaactgctcctcc

SEQ ID NO: 196 - DNA, 16 bp, Artificial sequence
  Synthetic oligonucleotide
gccccaggtgaagtcc

SEQ ID NO: 197 - DNA, 16 bp, Artificial sequence
  Synthetic oligonucleotide
cgaggcacagtagtga

SEQ ID NO: 198 - DNA, 16 bp, Artificial sequence
  Synthetic oligonucleotide
acctcgctgtcggtcc

SEQ ID NO: 199 - DNA, 16 bp, Artificial sequence
  Synthetic oligonucleotide
ccggagcatgatgagt

SEQ ID NO: 200 - DNA, 16 bp, Artificial sequence
  Synthetic oligonucleotide
tgccacaggtggatgg

SEQ ID NO: 201 - DNA, 16 bp, Artificial sequence
  Synthetic oligonucleotide
gttgagccacctaatg

SEQ ID NO: 202 - DNA, 16 bp, Artificial sequence
  Synthetic oligonucleotide
tgccccacagccgggc

SEQ ID NO: 203 - DNA, 16 bp, Artificial sequence
  Synthetic oligonucleotide
gcgggacggttcttgc

SEQ ID NO: 204 - DNA, 16 bp, Artificial sequence
  Synthetic oligonucleotide
ggagcggctcagcttg

SEQ ID NO: 205 - DNA, 16 bp, Artificial sequence
  Synthetic oligonucleotide
ccggatgatgcccttc

SEQ ID NO: 206 - DNA, 16 bp, Artificial sequence
  Synthetic oligonucleotide
ctggtagacgaggcgc

SEQ ID NO: 207 - DNA, 16 bp, Artificial sequence
  Synthetic oligonucleotide
tgcccgttttccccca

SEQ ID NO: 208 - DNA, 16 bp, Artificial sequence
  Synthetic oligonucleotide
gaggacccatatcccc

SEQ ID NO: 209 - DNA, 16 bp, Artificial sequence
  Synthetic oligonucleotide
gaggaagcacccctgc

SEQ ID NO: 210 - DNA, 16 bp, Artificial sequence
  Synthetic oligonucleotide
gtggcctttgtcgagt

SEQ ID NO: 211 - DNA, 16 bp, Artificial sequence
  Synthetic oligonucleotide
gtgcagatgtctccct

SEQ ID NO: 212 - DNA, 16 bp, Artificial sequence
  Synthetic oligonucleotide
ctgtgaagtgtcagca

SEQ ID NO: 213 - DNA, 16 bp, Artificial sequence
  Synthetic oligonucleotide
gcccactggtggcctg

SEQ ID NO: 214 - DNA, 16 bp, Artificial sequence
  Synthetic oligonucleotide
gctgggcggccccagc

SEQ ID NO: 215 - DNA, 16 bp, Artificial sequence
  Synthetic oligonucleotide
gggtcccctacgcagt

SEQ ID NO: 216 - DNA, 16 bp, Artificial sequence
  Synthetic oligonucleotide
cctccgtgaagcctgc

SEQ ID NO: 217 - DNA, 16 bp, Artificial sequence
  Synthetic oligonucleotide
gccactcgcttggctg

SEQ ID NO: 218 - DNA, 16 bp, Artificial sequence
  Synthetic oligonucleotide
ggagctaggtcccagc

SEQ ID NO: 219 - DNA, 16 bp, Artificial sequence
  Synthetic oligonucleotide
gccccttggccgatcc

SEQ ID NO: 220 - DNA, 16 bp, Artificial sequence
  Synthetic oligonucleotide
tgcccccgtcaggcct

SEQ ID NO: 221 - DNA, 16 bp, Artificial sequence
  Synthetic oligonucleotide
gatgtctggaggctct

SEQ ID NO: 222 - DNA, 16 bp, Artificial sequence
  Synthetic oligonucleotide
aggcccaccgcagccc

SEQ ID NO: 223 - DNA, 16 bp, Artificial sequence
  Synthetic oligonucleotide
gggcactggaagccaa

SEQ ID NO: 224 - DNA, 16 bp, Artificial sequence
  Synthetic oligonucleotide
cccttccttacggccc

SEQ ID NO: 225 - DNA, 16 bp, Artificial sequence
  Synthetic oligonucleotide
ccatccatccaagtcc

SEQ ID NO: 226 - DNA, 16 bp, Artificial sequence
  Synthetic oligonucleotide
aggacccaggtcgctg

SEQ ID NO: 227 - DNA, 16 bp, Artificial sequence
  Synthetic oligonucleotide
gccatgtccagggtcc

SEQ ID NO: 228 - DNA, 16 bp, Artificial sequence
  Synthetic oligonucleotide
cagcagggtccggacc

SEQ ID NO: 229 - DNA, 16 bp, Artificial sequence
  Synthetic oligonucleotide
ggtgtgcccaacctgc

SEQ ID NO: 230 - DNA, 16 bp, Artificial sequence
  Synthetic oligonucleotide
cgctctgtcgagtgca

SEQ ID NO: 231 - DNA, 16 bp, Artificial sequence
  Synthetic oligonucleotide
acccccccccgcagcc

SEQ ID NO: 232 - DNA, 16 bp, Artificial sequence
  Synthetic oligonucleotide
gacccgcgcagcctcc

SEQ ID NO: 233 - DNA, 16 bp, Artificial sequence
  Synthetic oligonucleotide
agacaggctcagtgca

SEQ ID NO: 234 - DNA, 16 bp, Artificial sequence
  Synthetic oligonucleotide
ccctcccacacgccgg

SEQ ID NO: 235 - DNA, 16 bp, Artificial sequence
  Synthetic oligonucleotide
ccgacccaccccagcg

SEQ ID NO: 236 - DNA, 16 bp, Artificial sequence
  Synthetic oligonucleotide
gtggaggacacagaga

SEQ ID NO: 237 - DNA, 16 bp, Artificial sequence
  Synthetic oligonucleotide
gtcggcctggcatggg

SEQ ID NO: 238 - DNA, 16 bp, Artificial sequence
  Synthetic oligonucleotide
gggcactccatcccct

SEQ ID NO: 239 - DNA, 16 bp, Artificial sequence
  Synthetic oligonucleotide
aggcatcccctcagct

SEQ ID NO: 240 - DNA, 16 bp, Artificial sequence
  Synthetic oligonucleotide
ttcatagactttccct

SEQ ID NO: 241 - DNA, 16 bp, Artificial sequence
  Synthetic oligonucleotide
gccccgagggtggagg

SEQ ID NO: 242 - DNA, 16 bp, Artificial sequence
  Synthetic oligonucleotide
cccccatgcaccgtgc

SEQ ID NO: 243 - DNA, 16 bp, Artificial sequence
  Synthetic oligonucleotide
cagcagtgcccacggc

SEQ ID NO: 244 - DNA, 16 bp, Artificial sequence
  Synthetic oligonucleotide
gaagcggccatagctg

SEQ ID NO: 245 - DNA, 16 bp, Artificial sequence
  Synthetic oligonucleotide
ttgtaatactggcgga

SEQ ID NO: 246 - DNA, 16 bp, Artificial sequence
  Synthetic oligonucleotide
cagccgcgagatgaag

SEQ ID NO: 247 - DNA, 16 bp, Artificial sequence
  Synthetic oligonucleotide
gcagagtgcaggaatg

SEQ ID NO: 248 - DNA, 16 bp, Artificial sequence
  Synthetic oligonucleotide
ggcagtgtggacacgg

SEQ ID NO: 249 - DNA, 16 bp, Artificial sequence
  Synthetic oligonucleotide
aaggcccaacctgagg

SEQ ID NO: 250 - DNA, 16 bp, Artificial sequence
  Synthetic oligonucleotide
cctgctggcaccgtgg

SEQ ID NO: 251 - DNA, 16 bp, Artificial sequence
  Synthetic oligonucleotide
actcaggttggccact

SEQ ID NO: 252 - DNA, 16 bp, Artificial sequence
  Synthetic oligonucleotide
ctgcagtgccaacttc

SEQ ID NO: 253 - DNA, 16 bp, Artificial sequence
  Synthetic oligonucleotide
gggctggcggctgtgt

SEQ ID NO: 254 - DNA, 16 bp, Artificial sequence
  Synthetic oligonucleotide
gcccatgccgctgctg

SEQ ID NO: 255 - DNA, 16 bp, Artificial sequence
  Synthetic oligonucleotide
gcgacaccgtgtcggg

SEQ ID NO: 256 - DNA, 16 bp, Artificial sequence
  Synthetic oligonucleotide
tgccgccttctccaag

SEQ ID NO: 257 - DNA, 16 bp, Artificial sequence
  Synthetic oligonucleotide
gactccagtcccgtct

SEQ ID NO: 258 - DNA, 16 bp, Artificial sequence
  Synthetic oligonucleotide
ggcggacaggccctgc

SEQ ID NO: 259 - DNA, 16 bp, Artificial sequence
  Synthetic oligonucleotide
gtcaaagtaggagagg

SEQ ID NO: 260 - DNA, 16 bp, Artificial sequence
  Synthetic oligonucleotide
cccgactgctggcccc

SEQ ID NO: 261 - DNA, 16 bp, Artificial sequence
  Synthetic oligonucleotide
ccgggcactgctcagg

SEQ ID NO: 262 - DNA, 16 bp, Artificial sequence
  Synthetic oligonucleotide
gtccaggctgcccgct

SEQ ID NO: 263 - DNA, 16 bp, Artificial sequence
  Synthetic oligonucleotide
tccaaggtcagcccgc

SEQ ID NO: 264 - DNA, 16 bp, Artificial sequence
  Synthetic oligonucleotide
tggactgcacctgctc

SEQ ID NO: 265 - DNA, 16 bp, Artificial sequence
  Synthetic oligonucleotide
tccttgagcacttcgc

SEQ ID NO: 266 - DNA, 16 bp, Artificial sequence
  Synthetic oligonucleotide
cttgcaggccgtctcg

SEQ ID NO: 267 - DNA, 16 bp, Artificial sequence
  Synthetic oligonucleotide
catgggatctgcggtg

SEQ ID NO: 268 - DNA, 16 bp, Artificial sequence
  Synthetic oligonucleotide
ggtattggtgctctgt

SEQ ID NO: 269 - DNA, 16 bp, Artificial sequence
  Synthetic oligonucleotide
gcgcacagctccttgc

SEQ ID NO: 270 - DNA, 16 bp, Artificial sequence
  Synthetic oligonucleotide
gctggcggaactgctc

SEQ ID NO: 271 - DNA, 16 bp, Artificial sequence
  Synthetic oligonucleotide
tcatccaggccgctga

SEQ ID NO: 272 - DNA, 16 bp, Artificial sequence
  Synthetic oligonucleotide
gaatcgccccaggtga

SEQ ID NO: 273 - DNA, 16 bp, Artificial sequence
  Synthetic oligonucleotide
ggtcgaggcacagtag

SEQ ID NO: 274 - DNA, 16 bp, Artificial sequence
  Synthetic oligonucleotide
gtccacctcgctgtcg

SEQ ID NO: 275 - DNA, 16 bp, Artificial sequence
  Synthetic oligonucleotide
gcccggagcatgatga

SEQ ID NO: 276 - DNA, 16 bp, Artificial sequence
  Synthetic oligonucleotide
gaactgccacaggtgg

SEQ ID NO: 277 - DNA, 16 bp, Artificial sequence
  Synthetic oligonucleotide
ccttgttgagccacct

SEQ ID NO: 278 - DNA, 16 bp, Artificial sequence
  Synthetic oligonucleotide
gcggatgccccacagc

SEQ ID NO: 279 - DNA, 16 bp, Artificial sequence
  Synthetic oligonucleotide
catggcgggacggttc

SEQ ID NO: 280 - DNA, 16 bp, Artificial sequence
  Synthetic oligonucleotide
gatggagcggctcagc

SEQ ID NO: 281 - DNA, 16 bp, Artificial sequence
  Synthetic oligonucleotide
ggcttccggatgatgc

SEQ ID NO: 282 - DNA, 16 bp, Artificial sequence
  Synthetic oligonucleotide
aactggtagacgaggc

SEQ ID NO: 283 - DNA, 16 bp, Artificial sequence
  Synthetic oligonucleotide
actgcccgttttcccc

SEQ ID NO: 284 - DNA, 16 bp, Artificial sequence
  Synthetic oligonucleotide
cccagaggacccatat

SEQ ID NO: 285 - DNA, 16 bp, Artificial sequence
  Synthetic oligonucleotide
gggagcagccctgtct

SEQ ID NO: 286 - DNA, 16 bp, Artificial sequence
  Synthetic oligonucleotide
cctgtggcctttgtcg

SEQ ID NO: 287 - DNA, 16 bp, Artificial sequence
  Synthetic oligonucleotide
tattatccattcccgg

SEQ ID NO: 288 - DNA, 16 bp, Artificial sequence
  Synthetic oligonucleotide
ctcactggtcgaggct

SEQ ID NO: 289 - DNA, 16 bp, Artificial sequence
  Synthetic oligonucleotide
tcgcccaccccccagc

SEQ ID NO: 290 - DNA, 16 bp, Artificial sequence
  Synthetic oligonucleotide
gtcccgaactggaccc

SEQ ID NO: 291 - DNA, 16 bp, Artificial sequence
  Synthetic oligonucleotide
ccagccctggccgagg

SEQ ID NO: 292 - DNA, 16 bp, Artificial sequence
  Synthetic oligonucleotide
tggatacccccacggg

SEQ ID NO: 293 - DNA, 16 bp, Artificial sequence
  Synthetic oligonucleotide
ccggcccccgcacccg

SEQ ID NO: 294 - DNA, 16 bp, Artificial sequence
  Synthetic oligonucleotide
gcccagggcaactcgg

SEQ ID NO: 295 - DNA, 16 bp, Artificial sequence
  Synthetic oligonucleotide
ccggttcccacctgtg

SEQ ID NO: 296 - DNA, 16 bp, Artificial sequence
  Synthetic oligonucleotide
acacggatgtcaccgg

SEQ ID NO: 297 - DNA, 16 bp, Artificial sequence
  Synthetic oligonucleotide
gccctggttgagccca

SEQ ID NO: 298 - DNA, 16 bp, Artificial sequence
  Synthetic oligonucleotide
gctgacacttttggca

SEQ ID NO: 299 - DNA, 16 bp, Artificial sequence
  Synthetic oligonucleotide
gctggcagacccggca

SEQ ID NO: 300 - DNA, 16 bp, Artificial sequence
  Synthetic oligonucleotide
gggtgaggctttgtgg

SEQ ID NO: 301 - DNA, 16 bp, Artificial sequence
  Synthetic oligonucleotide
gggaggaccttgctgc

SEQ ID NO: 302 - DNA, 16 bp, Artificial sequence
  Synthetic oligonucleotide
cccatgtggcctactg

SEQ ID NO: 303 - DNA, 16 bp, Artificial sequence
  Synthetic oligonucleotide
ccacaccccaactggc

SEQ ID NO: 304 - DNA, 16 bp, Artificial sequence
  Synthetic oligonucleotide
ggccactgctccgtag

SEQ ID NO: 305 - DNA, 16 bp, Artificial sequence
  Synthetic oligonucleotide
tcccagtggctggtgc

SEQ ID NO: 306 - DNA, 16 bp, Artificial sequence
  Synthetic oligonucleotide
ctccgtccccaaggca

SEQ ID NO: 307 - DNA, 16 bp, Artificial sequence
  Synthetic oligonucleotide
gcagcacaggccttac

SEQ ID NO: 308 - DNA, 16 bp, Artificial sequence
  Synthetic oligonucleotide
tgctgtgggcccacat

SEQ ID NO: 309 - DNA, 16 bp, Artificial sequence
  Synthetic oligonucleotide
ccctactgggacagca

SEQ ID NO: 310 - DNA, 16 bp, Artificial sequence
  Synthetic oligonucleotide
gactggagaggtgcgc

SEQ ID NO: 311 - DNA, 16 bp, Artificial sequence
  Synthetic oligonucleotide
tgcgccatttggcgga

SEQ ID NO: 312 - DNA, 16 bp, Artificial sequence
  Synthetic oligonucleotide
gggaccctaggctggc

SEQ ID NO: 313 - DNA, 16 bp, Artificial sequence
  Synthetic oligonucleotide
ctcaattcccccgtcc

SEQ ID NO: 314 - DNA, 16 bp, Artificial sequence
  Synthetic oligonucleotide
ggctgcccccacttaa

SEQ ID NO: 315 - DNA, 16 bp, Artificial sequence
  Synthetic oligonucleotide
acccctcaaggaacca

SEQ ID NO: 316 - DNA, 16 bp, Artificial sequence
  Synthetic oligonucleotide
cagccatgccacatcc

SEQ ID NO: 317 - DNA, 16 bp, Artificial sequence
  Synthetic oligonucleotide
ggccactgtggacacg

SEQ ID NO: 318 - DNA, 16 bp, Artificial sequence
  Synthetic oligonucleotide
ggccgctgcagggcaa

SEQ ID NO: 319 - DNA, 16 bp, Artificial sequence
  Synthetic oligonucleotide
cagggctgtcccatga

SEQ ID NO: 320 - DNA, 16 bp, Artificial sequence
  Synthetic oligonucleotide
aacctcccggtacagg

SEQ ID NO: 321 - DNA, 16 bp, Artificial sequence
  Synthetic oligonucleotide
atgaagcggccatagc

SEQ ID NO: 322 - DNA, 16 bp, Artificial sequence
  Synthetic oligonucleotide
agcttgcaggccgtct

SEQ ID NO: 323 - DNA, 16 bp, Artificial sequence
  Synthetic oligonucleotide
ttcttgtaatactggc

SEQ ID NO: 324 - DNA, 16 bp, Artificial sequence
  Synthetic oligonucleotide
gacagccgcgagatga

SEQ ID NO: 325 - DNA, 16 bp, Artificial sequence
  Synthetic oligonucleotide
cggcagagtgcaggaa

SEQ ID NO: 326 - DNA, 16 bp, Artificial sequence
  Synthetic oligonucleotide
aggactgggtctgtgg

SEQ ID NO: 327 - DNA, 16 bp, Artificial sequence
  Synthetic oligonucleotide
ggcaaggcccaacctg

SEQ ID NO: 328 - DNA, 16 bp, Artificial sequence
  Synthetic oligonucleotide
tgcctgctggcaccgt

SEQ ID NO: 329 - DNA, 16 bp, Artificial sequence
  Synthetic oligonucleotide
gcactcaggttggcca

SEQ ID NO: 330 - DNA, 16 bp, Artificial sequence
  Synthetic oligonucleotide
tgctgcagtgccaact

SEQ ID NO: 331 - DNA, 16 bp, Artificial sequence
  Synthetic oligonucleotide
gtttgggctggcggct

SEQ ID NO: 332 - DNA, 16 bp, Artificial sequence
  Synthetic oligonucleotide
cagacccgggctggcg

SEQ ID NO: 333 - DNA, 16 bp, Artificial sequence
  Synthetic oligonucleotide
ccgcgacaccgtgtcg

SEQ ID NO: 334 - DNA, 16 bp, Artificial sequence
  Synthetic oligonucleotide
ccccgctgccgccttc

SEQ ID NO: 335 - DNA, 16 bp, Artificial sequence
  Synthetic oligonucleotide
tgggactccagtcccg

SEQ ID NO: 336 - DNA, 16 bp, Artificial sequence
  Synthetic oligonucleotide
gaaggcggacaggccc

SEQ ID NO: 337 - DNA, 16 bp, Artificial sequence
  Synthetic oligonucleotide
agcatgtcaaagtagg

SEQ ID NO: 338 - DNA, 16 bp, Artificial sequence
  Synthetic oligonucleotide
ctcccgactgctggcc

SEQ ID NO: 339 - DNA, 16 bp, Artificial sequence
  Synthetic oligonucleotide
atgaccgggcactgct

SEQ ID NO: 340 - DNA, 16 bp, Artificial sequence
  Synthetic oligonucleotide
ccgggcaccaagtcca

SEQ ID NO: 341 - DNA, 16 bp, Artificial sequence
  Synthetic oligonucleotide
cagcgagtgctcctcc

SEQ ID NO: 342 - DNA, 16 bp, Artificial sequence
  Synthetic oligonucleotide
caccatggactgcacc

SEQ ID NO: 343 - DNA, 16 bp, Artificial sequence
  Synthetic oligonucleotide
tgtccttgagcacttc

SEQ ID NO: 344 - DNA, 16 bp, Artificial sequence
  Synthetic oligonucleotide
tccatgggatctgcgg

SEQ ID NO: 345 - DNA, 16 bp, Artificial sequence
  Synthetic oligonucleotide
gccggtattggtgctc

SEQ ID NO: 346 - DNA, 16 bp, Artificial sequence
  Synthetic oligonucleotide
ctccgacatggcgcac

SEQ ID NO: 347 - DNA, 16 bp, Artificial sequence
  Synthetic oligonucleotide
gcgctggcggaactgc

SEQ ID NO: 348 - DNA, 16 bp, Artificial sequence
  Synthetic oligonucleotide
gtccgctctttcatcc

SEQ ID NO: 349 - DNA, 16 bp, Artificial sequence
  Synthetic oligonucleotide
gtgaatcgccccaggt

SEQ ID NO: 350 - DNA, 16 bp, Artificial sequence
  Synthetic oligonucleotide
cactggtcgaggcaca

SEQ ID NO: 351 - DNA, 16 bp, Artificial sequence
  Synthetic oligonucleotide
tgagtccacctcgctg

SEQ ID NO: 352 - DNA, 16 bp, Artificial sequence
  Synthetic oligonucleotide
gggctgcccggagcat

SEQ ID NO: 353 - DNA, 16 bp, Artificial sequence
  Synthetic oligonucleotide
agcaactccttgagga

SEQ ID NO: 354 - DNA, 16 bp, Artificial sequence
  Synthetic oligonucleotide
tgaagatgcccttctc

SEQ ID NO: 355 - DNA, 16 bp, Artificial sequence
  Synthetic oligonucleotide
cttgcggatgccccac

SEQ ID NO: 356 - DNA, 16 bp, Artificial sequence
  Synthetic oligonucleotide
gttcatggcgggacgg

SEQ ID NO: 357 - DNA, 16 bp, Artificial sequence
  Synthetic oligonucleotide
cggatggagcggctca

SEQ ID NO: 358 - DNA, 16 bp, Artificial sequence
  Synthetic oligonucleotide
ctggcttccggatgat

SEQ ID NO: 359 - DNA, 16 bp, Artificial sequence
  Synthetic oligonucleotide
gcacgaactggtagac

SEQ ID NO: 360 - DNA, 16 bp, Artificial sequence
  Synthetic oligonucleotide
gcagactgcccgtttt

SEQ ID NO: 361 - DNA, 16 bp, Artificial sequence
  Synthetic oligonucleotide
cccgaaggccccagag

SEQ ID NO: 362 - DNA, 16 bp, Artificial sequence
  Synthetic oligonucleotide
cttctgtaggctctgc

SEQ ID NO: 363 - DNA, 16 bp, Artificial sequence
  Synthetic oligonucleotide
tgcctgtggcctttgt

SEQ ID NO: 364 - DNA, 16 bp, Artificial sequence
  Synthetic oligonucleotide
tctctagtatctttat

SEQ ID NO: 365 - DNA, 16 bp, Artificial sequence
  Synthetic oligonucleotide
ctcccagcttgccaca

SEQ ID NO: 366 - DNA, 16 bp, Artificial sequence
  Synthetic oligonucleotide
gggatccaggtcacag

SEQ ID NO: 367 - DNA, 16 bp, Artificial sequence
  Synthetic oligonucleotide
agcggtgaccccagcc

SEQ ID NO: 368 - DNA, 16 bp, Artificial sequence
  Synthetic oligonucleotide
gagcagctggtgatgg

SEQ ID NO: 369 - DNA, 16 bp, Artificial sequence
  Synthetic oligonucleotide
gtgcagccctattccc

SEQ ID NO: 370 - DNA, 16 bp, Artificial sequence
  Synthetic oligonucleotide
tgccctctaggaggaa

SEQ ID NO: 371 - DNA, 16 bp, Artificial sequence
  Synthetic oligonucleotide
cccaaccccggctgct

SEQ ID NO: 372 - DNA, 16 bp, Artificial sequence
  Synthetic oligonucleotide
gcgccctgatcctcag

SEQ ID NO: 373 - DNA, 16 bp, Artificial sequence
  Synthetic oligonucleotide
cgtgaggtttcctggg

SEQ ID NO: 374 - DNA, 16 bp, Artificial sequence
  Synthetic oligonucleotide
ccgctcaaccttcagg

SEQ ID NO: 375 - DNA, 16 bp, Artificial sequence
  Synthetic oligonucleotide
gggctcccttgtaagc

SEQ ID NO: 376 - DNA, 16 bp, Artificial sequence
  Synthetic oligonucleotide
ggcacctgtccatgcg

SEQ ID NO: 377 - DNA, 16 bp, Artificial sequence
  Synthetic oligonucleotide
gctagtgggcccagga

SEQ ID NO: 378 - DNA, 16 bp, Artificial sequence
  Synthetic oligonucleotide
tcttgccctgctgttc

SEQ ID NO: 379 - DNA, 16 bp, Artificial sequence
  Synthetic oligonucleotide
cccccagccggcctca

SEQ ID NO: 380 - DNA, 16 bp, Artificial sequence
  Synthetic oligonucleotide
tgccactaccctgcct

SEQ ID NO: 381 - DNA, 16 bp, Artificial sequence
  Synthetic oligonucleotide
gaggtgcccacagtca

SEQ ID NO: 382 - DNA, 16 bp, Artificial sequence
  Synthetic oligonucleotide
ctgactgggctccttg

SEQ ID NO: 383 - DNA, 16 bp, Artificial sequence
  Synthetic oligonucleotide
ccccaccaagcctcgg

SEQ ID NO: 384 - DNA, 16 bp, Artificial sequence
  Synthetic oligonucleotide
ggcaggtggcagcttt

SEQ ID NO: 385 - DNA, 16 bp, Artificial sequence
  Synthetic oligonucleotide
cccattcaagggctcc

SEQ ID NO: 386 - DNA, 16 bp, Artificial sequence
  Synthetic oligonucleotide
ggagactccgcagtct

SEQ ID NO: 387 - DNA, 16 bp, Artificial sequence
  Synthetic oligonucleotide
ccccacgggccgcccc

SEQ ID NO: 388 - DNA, 16 bp, Artificial sequence
  Synthetic oligonucleotide
ggttgggcagacaggc

SEQ ID NO: 389 - DNA, 16 bp, Artificial sequence
  Synthetic oligonucleotide
gtggcgggagcagagt

SEQ ID NO: 390 - DNA, 16 bp, Artificial sequence
  Synthetic oligonucleotide
gccctaggaggtcccc

SEQ ID NO: 391 - DNA, 16 bp, Artificial sequence
  Synthetic oligonucleotide
ggtccagccagtgtcc

SEQ ID NO: 392 - DNA, 16 bp, Artificial sequence
  Synthetic oligonucleotide
cctcagccctagaggg

SEQ ID NO: 393 - DNA, 16 bp, Artificial sequence
  Synthetic oligonucleotide
gccctagcagagggca

SEQ ID NO: 394 - DNA, 16 bp, Artificial sequence
  Synthetic oligonucleotide
ggctgacacgcagcca

SEQ ID NO: 395 - DNA, 16 bp, Artificial sequence
  Synthetic oligonucleotide
cccacccgagcccccg

SEQ ID NO: 396 - DNA, 16 bp, Artificial sequence
  Synthetic oligonucleotide
ctgtgcagtactaaaa

SEQ ID NO: 397 - DNA, 16 bp, Artificial sequence
  Synthetic oligonucleotide
ggccccagtgaatggc

SEQ ID NO: 398 - DNA, 16 bp, Artificial sequence
  Synthetic oligonucleotide
ggcggatggagcggct

SEQ ID NO: 399 - DNA, 16 bp, Artificial sequence
  Synthetic oligonucleotide
gcccttcttgtaatac

SEQ ID NO: 400 - DNA, 16 bp, Artificial sequence
  Synthetic oligonucleotide
tcagacagccgcgaga

SEQ ID NO: 401 - DNA, 16 bp, Artificial sequence
  Synthetic oligonucleotide
cacggcagagtgcagg

SEQ ID NO: 402 - DNA, 16 bp, Artificial sequence
  Synthetic oligonucleotide
ggaggactgggtctgt

SEQ ID NO: 403 - DNA, 16 bp, Artificial sequence
  Synthetic oligonucleotide
gtggcaaggcccaacc

SEQ ID NO: 404 - DNA, 16 bp, Artificial sequence
  Synthetic oligonucleotide
gtagggagtcccctac

SEQ ID NO: 405 - DNA, 16 bp, Artificial sequence
  Synthetic oligonucleotide
ggcagcactcaggttg

SEQ ID NO: 406 - DNA, 16 bp, Artificial sequence
  Synthetic oligonucleotide
gttagctgcctggtgc

SEQ ID NO: 407 - DNA, 16 bp, Artificial sequence
  Synthetic oligonucleotide
gctgtttgggctggcg

SEQ ID NO: 408 - DNA, 16 bp, Artificial sequence
  Synthetic oligonucleotide
ctgctcagacccgggc

SEQ ID NO: 409 - DNA, 16 bp, Artificial sequence
  Synthetic oligonucleotide
gtccgcgacaccgtgt

SEQ ID NO: 410 - DNA, 16 bp, Artificial sequence
  Synthetic oligonucleotide
ctcgagacccactgcc

SEQ ID NO: 411 - DNA, 16 bp, Artificial sequence
  Synthetic oligonucleotide
actgggactccagtcc

SEQ ID NO: 412 - DNA, 16 bp, Artificial sequence
  Synthetic oligonucleotide
tagaaggcggacaggc

SEQ ID NO: 413 - DNA, 16 bp, Artificial sequence
  Synthetic oligonucleotide
gggtacagcatgtcaa

SEQ ID NO: 414 - DNA, 16 bp, Artificial sequence
  Synthetic oligonucleotide
ggctcctcccgactgc

SEQ ID NO: 415 - DNA, 16 bp, Artificial sequence
  Synthetic oligonucleotide
gtcaatgaccgggcac

SEQ ID NO: 416 - DNA, 16 bp, Artificial sequence
  Synthetic oligonucleotide
ccgccgggcaccaagt

SEQ ID NO: 417 - DNA, 16 bp, Artificial sequence
  Synthetic oligonucleotide
ccagcgagtgctcctc

SEQ ID NO: 418 - DNA, 16 bp, Artificial sequence
  Synthetic oligonucleotide
accaccatggactgca

SEQ ID NO: 419 - DNA, 16 bp, Artificial sequence
  Synthetic oligonucleotide
ctcgatgtccttgagc

SEQ ID NO: 420 - DNA, 16 bp, Artificial sequence
  Synthetic oligonucleotide
tgttgagcagcttgca

SEQ ID NO: 421 - DNA, 16 bp, Artificial sequence
  Synthetic oligonucleotide
ctccagtccatgggat

SEQ ID NO: 422 - DNA, 16 bp, Artificial sequence
  Synthetic oligonucleotide
cagccggtattggtgc

SEQ ID NO: 423 - DNA, 16 bp, Artificial sequence
  Synthetic oligonucleotide
tcctccgacatggcgc

SEQ ID NO: 424 - DNA, 16 bp, Artificial sequence
  Synthetic oligonucleotide
gtgcagcacatcccca

SEQ ID NO: 425 - DNA, 16 bp, Artificial sequence
  Synthetic oligonucleotide
gaagtccgctctttca

SEQ ID NO: 426 - DNA, 16 bp, Artificial sequence
  Synthetic oligonucleotide
agtagtgaatcgcccc

SEQ ID NO: 427 - DNA, 16 bp, Artificial sequence
  Synthetic oligonucleotide
cctcactggtcgaggc

SEQ ID NO: 428 - DNA, 16 bp, Artificial sequence
  Synthetic oligonucleotide
gatgagtccacctcgc

SEQ ID NO: 429 - DNA, 16 bp, Artificial sequence
  Synthetic oligonucleotide
ggatgggctgcccgga

SEQ ID NO: 430 - DNA, 16 bp, Artificial sequence
  Synthetic oligonucleotide
gagtagcaactccttg

SEQ ID NO: 431 - DNA, 16 bp, Artificial sequence
  Synthetic oligonucleotide
cctaatgaagcggcca

SEQ ID NO: 432 - DNA, 16 bp, Artificial sequence
  Synthetic oligonucleotide
attttgaagatgccct

SEQ ID NO: 433 - DNA, 16 bp, Artificial sequence
  Synthetic oligonucleotide
ttcttgcggatgcccc

SEQ ID NO: 434 - DNA, 16 bp, Artificial sequence
  Synthetic oligonucleotide
cgtagttcatggcggg

SEQ ID NO: 435 - DNA, 16 bp, Artificial sequence
  Synthetic oligonucleotide
tgtctggcttccggat

SEQ ID NO: 436 - DNA, 16 bp, Artificial sequence
  Synthetic oligonucleotide
ggtgcacgaactggta

SEQ ID NO: 437 - DNA, 16 bp, Artificial sequence
  Synthetic oligonucleotide
gagcagactgcccgtt

SEQ ID NO: 438 - DNA, 16 bp, Artificial sequence
  Synthetic oligonucleotide
gggtcccgaaggcccc

SEQ ID NO: 439 - DNA, 16 bp, Artificial sequence
  Synthetic oligonucleotide
gcccttctgtaggctc

SEQ ID NO: 440 - DNA, 16 bp, Artificial sequence
  Synthetic oligonucleotide
ctggactgcctgtggc

SEQ ID NO: 441 - DNA, 16 bp, Artificial sequence
  Synthetic oligonucleotide
gttctctagtatcttt

SEQ ID NO: 442 - DNA, 16 bp, Artificial sequence
  Synthetic oligonucleotide
agacacatcccccttt

SEQ ID NO: 443 - DNA, 16 bp, Artificial sequence
  Synthetic oligonucleotide
ccaggccttgccgggc

SEQ ID NO: 444 - DNA, 16 bp, Artificial sequence
  Synthetic oligonucleotide
agaccaggacccaagg

SEQ ID NO: 445 - DNA, 16 bp, Artificial sequence
  Synthetic oligonucleotide
ggcctgcccgtctggt

SEQ ID NO: 446 - DNA, 16 bp, Artificial sequence
  Synthetic oligonucleotide
gtgggttctcccggtt

SEQ ID NO: 447 - DNA, 16 bp, Artificial sequence
  Synthetic oligonucleotide
tctagcccagtccagg

SEQ ID NO: 448 - DNA, 16 bp, Artificial sequence
  Synthetic oligonucleotide
gtcccatccgaccccc

SEQ ID NO: 449 - DNA, 16 bp, Artificial sequence
  Synthetic oligonucleotide
ccacacacctggttgt

SEQ ID NO: 450 - DNA, 16 bp, Artificial sequence
  Synthetic oligonucleotide
gccccgcatacgccgt

SEQ ID NO: 451 - DNA, 16 bp, Artificial sequence
  Synthetic oligonucleotide
gcccagacaaacctgg

SEQ ID NO: 452 - DNA, 16 bp, Artificial sequence
  Synthetic oligonucleotide
tgttagccctggcact

SEQ ID NO: 453 - DNA, 16 bp, Artificial sequence
  Synthetic oligonucleotide
tgccgggccctcccag

SEQ ID NO: 454 - DNA, 16 bp, Artificial sequence
  Synthetic oligonucleotide
ggccaactgtccccct

SEQ ID NO: 455 - DNA, 16 bp, Artificial sequence
  Synthetic oligonucleotide
gccgcagtagcatgtc

SEQ ID NO: 456 - DNA, 16 bp, Artificial sequence
  Synthetic oligonucleotide
gcccgcccagagccca

SEQ ID NO: 457 - DNA, 16 bp, Artificial sequence
  Synthetic oligonucleotide
caccttgggccccttc

SEQ ID NO: 458 - DNA, 16 bp, Artificial sequence
  Synthetic oligonucleotide
cagtgatggtccaccc

SEQ ID NO: 459 - DNA, 16 bp, Artificial sequence
  Synthetic oligonucleotide
ggtgcatgctctggcc

SEQ ID NO: 460 - DNA, 16 bp, Artificial sequence
  Synthetic oligonucleotide
gctcgggctccttcac

SEQ ID NO: 461 - DNA, 16 bp, Artificial sequence
  Synthetic oligonucleotide
ggtaggacaggaggca

SEQ ID NO: 462 - DNA, 16 bp, Artificial sequence
  Synthetic oligonucleotide
tgcccaaccttcccag

SEQ ID NO: 463 - DNA, 16 bp, Artificial sequence
  Synthetic oligonucleotide
gccgtctgggccagca

SEQ ID NO: 464 - DNA, 16 bp, Artificial sequence
  Synthetic oligonucleotide
cggccacccggaggca

SEQ ID NO: 465 - DNA, 16 bp, Artificial sequence
  Synthetic oligonucleotide
gggccgctaagctggt

SEQ ID NO: 466 - DNA, 16 bp, Artificial sequence
  Synthetic oligonucleotide
ggcctcatgcggatgg

SEQ ID NO: 467 - DNA, 16 bp, Artificial sequence
  Synthetic oligonucleotide
actcagcagccccgcc

SEQ ID NO: 468 - DNA, 16 bp, Artificial sequence
  Synthetic oligonucleotide
gataggctggtgggca

SEQ ID NO: 469 - DNA, 16 bp, Artificial sequence
  Synthetic oligonucleotide
gcccgcctcacccagg

SEQ ID NO: 470 - DNA, 16 bp, Artificial sequence
  Synthetic oligonucleotide
gtgcaccaggatccag

SEQ ID NO: 471 - DNA, 16 bp, Artificial sequence
  Synthetic oligonucleotide
gtctctgacagggtcc

SEQ ID NO: 472 - DNA, 16 bp, Artificial sequence
  Synthetic oligonucleotide
atgggaggccagtccc

SEQ ID NO: 473 - DNA, 16 bp, Artificial sequence
  Synthetic oligonucleotide
ttctcaggcagttcgg

SEQ ID NO: 474 - DNA, 16 bp, Artificial sequence
  Synthetic oligonucleotide
ccccctgctcgggtgg

SEQ ID NO: 475 - DNA, 16 bp, Artificial sequence
  Synthetic oligonucleotide
catggcgcacagctcc

SEQ ID NO: 476 - DNA, 16 bp, Artificial sequence
  Synthetic oligonucleotide
cgcgagatgaagagtt

SEQ ID NO: 477 - DNA, 16 bp, Artificial sequence
  Synthetic oligonucleotide
ttggaggactgggtct

SEQ ID NO: 478 - DNA, 16 bp, Artificial sequence
  Synthetic oligonucleotide
tagggagtcccctacc

SEQ ID NO: 479 - DNA, 16 bp, Artificial sequence
  Synthetic oligonucleotide
gcagtgccaacttcag

SEQ ID NO: 480 - DNA, 16 bp, Artificial sequence
  Synthetic oligonucleotide
tttgggctggcggctg

SEQ ID NO: 481 - DNA, 16 bp, Artificial sequence
  Synthetic oligonucleotide
gctgctcagacccggg

SEQ ID NO: 482 - DNA, 16 bp, Artificial sequence
  Synthetic oligonucleotide
tctcgagacccactgc

SEQ ID NO: 483 - DNA, 16 bp, Artificial sequence
  Synthetic oligonucleotide
tggactgggactccag

SEQ ID NO: 484 - DNA, 16 bp, Artificial sequence
  Synthetic oligonucleotide
atgtcaaagtaggaga

SEQ ID NO: 485 - DNA, 16 bp, Artificial sequence
  Synthetic oligonucleotide
ggtggctcctcccgac

SEQ ID NO: 486 - DNA, 16 bp, Artificial sequence
  Synthetic oligonucleotide
gtcagcccgccgggca

SEQ ID NO: 487 - DNA, 16 bp, Artificial sequence
  Synthetic oligonucleotide
cacttcgcccaccacc

SEQ ID NO: 488 - DNA, 16 bp, Artificial sequence
  Synthetic oligonucleotide
caggccgtctcgatgt

SEQ ID NO: 489 - DNA, 16 bp, Artificial sequence
  Synthetic oligonucleotide
cagtccatgggatctg

SEQ ID NO: 490 - DNA, 16 bp, Artificial sequence
  Synthetic oligonucleotide
cgtgcagcacatcccc

SEQ ID NO: 491 - DNA, 16 bp, Artificial sequence
  Synthetic oligonucleotide
tgaagtccgctctttc

SEQ ID NO: 492 - DNA, 16 bp, Artificial sequence
  Synthetic oligonucleotide
aggcacagtagtgaat

SEQ ID NO: 493 - DNA, 16 bp, Artificial sequence
  Synthetic oligonucleotide
tcgctgtcggtccagc

SEQ ID NO: 494 - DNA, 16 bp, Artificial sequence
  Synthetic oligonucleotide
gctgcccggagcatga

SEQ ID NO: 495 - DNA, 16 bp, Artificial sequence
  Synthetic oligonucleotide
tgaagcggccatagct

SEQ ID NO: 496 - DNA, 16 bp, Artificial sequence
  Synthetic oligonucleotide
gctgagtcctcaattt

SEQ ID NO: 497 - DNA, 16 bp, Artificial sequence
  Synthetic oligonucleotide
agatgtctggcttccg

SEQ ID NO: 498 - DNA, 16 bp, Artificial sequence
  Synthetic oligonucleotide
ggttgcccctccctga

SEQ ID NO: 499 - DNA, 16 bp, Artificial sequence
  Synthetic oligonucleotide
tgcccttctgtaggct

SEQ ID NO: 500 - DNA, 16 bp, Artificial sequence
  Synthetic oligonucleotide
ttattatccattcccg

SEQ ID NO: 501 - DNA, 16 bp, Artificial sequence
  Synthetic oligonucleotide
gcgctggagccccggg

SEQ ID NO: 502 - DNA, 16 bp, Artificial sequence
  Synthetic oligonucleotide
tgggccttgccccgca

SEQ ID NO: 503 - DNA, 16 bp, Artificial sequence
  Synthetic oligonucleotide
aggagctaggtcccag

SEQ ID NO: 504 - DNA, 16 bp, Artificial sequence
  Synthetic oligonucleotide
tcaggaccggttccca

SEQ ID NO: 505 - DNA, 16 bp, Artificial sequence
  Synthetic oligonucleotide
ctgacaggctaagaac

SEQ ID NO: 506 - DNA, 16 bp, Artificial sequence
  Synthetic oligonucleotide
tgttaggacaaagtga

SEQ ID NO: 507 - DNA, 16 bp, Artificial sequence
  Synthetic oligonucleotide
aaacattcctgcgccc

SEQ ID NO: 508 - DNA, 16 bp, Artificial sequence
  Synthetic oligonucleotide
acctggttgttggtct

SEQ ID NO: 509 - DNA, 16 bp, Artificial sequence
  Synthetic oligonucleotide
atctgccgtgtttctg

SEQ ID NO: 510 - DNA, 16 bp, Artificial sequence
  Synthetic oligonucleotide
tctcccgagaggtgtg

SEQ ID NO: 511 - DNA, 16 bp, Artificial sequence
  Synthetic oligonucleotide
ggacagcgatgtgaga

SEQ ID NO: 512 - DNA, 16 bp, Artificial sequence
  Synthetic oligonucleotide
cgatcctcttggcctc

SEQ ID NO: 513 - DNA, 16 bp, Artificial sequence
  Synthetic oligonucleotide
gcctgaggccccttgg

SEQ ID NO: 514 - DNA, 16 bp, Artificial sequence
  Synthetic oligonucleotide
gaacacacggatgtca

SEQ ID NO: 515 - DNA, 16 bp, Artificial sequence
  Synthetic oligonucleotide
tcacactaaggtccct

SEQ ID NO: 516 - DNA, 16 bp, Artificial sequence
  Synthetic oligonucleotide
cggtcccatccgaccc

SEQ ID NO: 517 - DNA, 16 bp, Artificial sequence
  Synthetic oligonucleotide
tggtgcgccgtcataa

SEQ ID NO: 518 - DNA, 16 bp, Artificial sequence
  Synthetic oligonucleotide
aagctggttacaagaa

SEQ ID NO: 519 - DNA, 16 bp, Artificial sequence
  Synthetic oligonucleotide
gggcaaggaattctga

SEQ ID NO: 520 - DNA, 16 bp, Artificial sequence
  Synthetic oligonucleotide
tacttccgcgcacaca

SEQ ID NO: 521 - DNA, 16 bp, Artificial sequence
  Synthetic oligonucleotide
ctccgagaatgccccc

SEQ ID NO: 522 - DNA, 16 bp, Artificial sequence
  Synthetic oligonucleotide
ggtaaaaagtgggttc

SEQ ID NO: 523 - DNA, 16 bp, Artificial sequence
  Synthetic oligonucleotide
aggaaaagtgacccgc

SEQ ID NO: 524 - DNA, 16 bp, Artificial sequence
  Synthetic oligonucleotide
gtcaagagtatgtctt

SEQ ID NO: 525 - DNA, 16 bp, Artificial sequence
  Synthetic oligonucleotide
cggtacactccttgaa

SEQ ID NO: 526 - DNA, 16 bp, Artificial sequence
  Synthetic oligonucleotide
ctgaaagactcagccc

SEQ ID NO: 527 - DNA, 16 bp, Artificial sequence
  Synthetic oligonucleotide
ccgcagcctggaggta

SEQ ID NO: 528 - DNA, 16 bp, Artificial sequence
  Synthetic oligonucleotide
aactgctttgccgggc

SEQ ID NO: 529 - DNA, 16 bp, Artificial sequence
  Synthetic oligonucleotide
cgctggacagaccacc

SEQ ID NO: 530 - DNA, 16 bp, Artificial sequence
  Synthetic oligonucleotide
acccaatgccagcccg

SEQ ID NO: 531 - DNA, 16 bp, Artificial sequence
  Synthetic oligonucleotide
aaggagagatttagtg

SEQ ID NO: 532 - DNA, 16 bp, Artificial sequence
  Synthetic oligonucleotide
tcctaggctcgcctca

SEQ ID NO: 533 - DNA, 16 bp, Artificial sequence
  Synthetic oligonucleotide
ccccactgttcatatc

SEQ ID NO: 534 - DNA, 16 bp, Artificial sequence
  Synthetic oligonucleotide
caccaagcctcggtcc

SEQ ID NO: 535 - DNA, 16 bp, Artificial sequence
  Synthetic oligonucleotide
gccctacccgctaggt

SEQ ID NO: 536 - DNA, 16 bp, Artificial sequence
  Synthetic oligonucleotide
cggtagggccacagct

SEQ ID NO: 537 - DNA, 16 bp, Artificial sequence
  Synthetic oligonucleotide
tcctttctcgagggtt

SEQ ID NO: 538 - DNA, 16 bp, Artificial sequence
  Synthetic oligonucleotide
caatagcagagtgcac

SEQ ID NO: 539 - DNA, 16 bp, Artificial sequence
  Synthetic oligonucleotide
ctcaacactctcaagg

SEQ ID NO: 540 - DNA, 16 bp, Artificial sequence
  Synthetic oligonucleotide
ccatttggcggatgag

SEQ ID NO: 541 - DNA, 16 bp, Artificial sequence
  Synthetic oligonucleotide
cgctaagctggttatg

SEQ ID NO: 542 - DNA, 16 bp, Artificial sequence
  Synthetic oligonucleotide
agcgaagtccaagagg

SEQ ID NO: 543 - DNA, 16 bp, Artificial sequence
  Synthetic oligonucleotide
ggattgatgagcaaaa

SEQ ID NO: 544 - DNA, 16 bp, Artificial sequence
  Synthetic oligonucleotide
ggcgacagcaggacag

SEQ ID NO: 545 - DNA, 16 bp, Artificial sequence
  Synthetic oligonucleotide
tcctagatgtccccct

SEQ ID NO: 546 - DNA, 16 bp, Artificial sequence
  Synthetic oligonucleotide
ggcgagaggaaggaac

SEQ ID NO: 547 - DNA, 16 bp, Artificial sequence
  Synthetic oligonucleotide
taatactctgctacta

SEQ ID NO: 548 - DNA, 16 bp, Artificial sequence
  Synthetic oligonucleotide
ccgtaaagggcttgca

SEQ ID NO: 549 - DNA, 16 bp, Artificial sequence
  Synthetic oligonucleotide
aatatgagatggtgga

SEQ ID NO: 550 - DNA, 16 bp, Artificial sequence
  Synthetic oligonucleotide
cggtgaggttaaagag

SEQ ID NO: 551 - DNA, 16 bp, Artificial sequence
  Synthetic oligonucleotide
acatggcgcacagctc

SEQ ID NO: 552 - DNA, 16 bp, Artificial sequence
  Synthetic oligonucleotide
acagccgcgagatgaa

SEQ ID NO: 553 - DNA, 16 bp, Artificial sequence
  Synthetic oligonucleotide
aggcccaacctgaggg

SEQ ID NO: 554 - DNA, 16 bp, Artificial sequence
  Synthetic oligonucleotide
tgtagggagtccccta

SEQ ID NO: 555 - DNA, 16 bp, Artificial sequence
  Synthetic oligonucleotide
tgcagtgccaacttca

SEQ ID NO: 556 - DNA, 16 bp, Artificial sequence
  Synthetic oligonucleotide
tgtttgggctggcggc

SEQ ID NO: 557 - DNA, 16 bp, Artificial sequence
  Synthetic oligonucleotide
acgctgctcagacccg

SEQ ID NO: 558 - DNA, 16 bp, Artificial sequence
  Synthetic oligonucleotide
ctctcgagacccactg

SEQ ID NO: 559 - DNA, 16 bp, Artificial sequence
  Synthetic oligonucleotide
gtggactgggactcca

SEQ ID NO: 560 - DNA, 16 bp, Artificial sequence
  Synthetic oligonucleotide
catgtcaaagtaggag

SEQ ID NO: 561 - DNA, 16 bp, Artificial sequence
  Synthetic oligonucleotide
gaccgggcactgctca

SEQ ID NO: 562 - DNA, 16 bp, Artificial sequence
  Synthetic oligonucleotide
aggtcagcccgccggg

SEQ ID NO: 563 - DNA, 16 bp, Artificial sequence
  Synthetic oligonucleotide
gcacttcgcccaccac

SEQ ID NO: 564 - DNA, 16 bp, Artificial sequence
  Synthetic oligonucleotide
tgcaggccgtctcgat

SEQ ID NO: 565 - DNA, 16 bp, Artificial sequence
  Synthetic oligonucleotide
ccagtccatgggatct

SEQ ID NO: 566 - DNA, 16 bp, Artificial sequence
  Synthetic oligonucleotide
gacttccagatgtcca

SEQ ID NO: 567 - DNA, 16 bp, Artificial sequence
  Synthetic oligonucleotide
gtgaagtccgctcttt

SEQ ID NO: 568 - DNA, 16 bp, Artificial sequence
  Synthetic oligonucleotide
gaggcacagtagtgaa

SEQ ID NO: 569 - DNA, 16 bp, Artificial sequence
  Synthetic oligonucleotide
ctcgctgtcggtccag

SEQ ID NO: 570 - DNA, 16 bp, Artificial sequence
  Synthetic oligonucleotide
ggctgcccggagcatg

SEQ ID NO: 571 - DNA, 16 bp, Artificial sequence
  Synthetic oligonucleotide
taatgaagcggccata

SEQ ID NO: 572 - DNA, 16 bp, Artificial sequence
  Synthetic oligonucleotide
cgggacggttcttgcg

SEQ ID NO: 573 - DNA, 16 bp, Artificial sequence
  Synthetic oligonucleotide
ggagatgtctggcttc

SEQ ID NO: 574 - DNA, 16 bp, Artificial sequence
  Synthetic oligonucleotide
agttggttgcccctcc

SEQ ID NO: 575 - DNA, 16 bp, Artificial sequence
  Synthetic oligonucleotide
ctgcccttctgtaggc

SEQ ID NO: 576 - DNA, 16 bp, Artificial sequence
  Synthetic oligonucleotide
agttctctagtatctt

SEQ ID NO: 577 - DNA, 16 bp, Artificial sequence
  Synthetic oligonucleotide
aaccagtctcaggcgc

SEQ ID NO: 578 - DNA, 16 bp, Artificial sequence
  Synthetic oligonucleotide
ctgggccttgccccgc

SEQ ID NO: 579 - DNA, 16 bp, Artificial sequence
  Synthetic oligonucleotide
gaggagctaggtccca

SEQ ID NO: 580 - DNA, 16 bp, Artificial sequence
  Synthetic oligonucleotide
atcaggaccggttccc

SEQ ID NO: 581 - DNA, 16 bp, Artificial sequence
  Synthetic oligonucleotide
gtcctgacaggctaag

SEQ ID NO: 582 - DNA, 16 bp, Artificial sequence
  Synthetic oligonucleotide
gtgttaggacaaagtg

SEQ ID NO: 583 - DNA, 16 bp, Artificial sequence
  Synthetic oligonucleotide
aaaacattcctgcgcc

SEQ ID NO: 584 - DNA, 16 bp, Artificial sequence
  Synthetic oligonucleotide
cacctggttgttggtc

SEQ ID NO: 585 - DNA, 16 bp, Artificial sequence
  Synthetic oligonucleotide
catctgccgtgtttct

SEQ ID NO: 586 - DNA, 16 bp, Artificial sequence
  Synthetic oligonucleotide
tgtctcccgagaggtg

SEQ ID NO: 587 - DNA, 16 bp, Artificial sequence
  Synthetic oligonucleotide
aggacagcgatgtgag

SEQ ID NO: 588 - DNA, 16 bp, Artificial sequence
  Synthetic oligonucleotide
ccgatcctcttggcct

SEQ ID NO: 589 - DNA, 16 bp, Artificial sequence
  Synthetic oligonucleotide
ccggagctctgctgct

SEQ ID NO: 590 - DNA, 16 bp, Artificial sequence
  Synthetic oligonucleotide
agaacacacggatgtc

SEQ ID NO: 591 - DNA, 16 bp, Artificial sequence
  Synthetic oligonucleotide
gtcacactaaggtccc

SEQ ID NO: 592 - DNA, 16 bp, Artificial sequence
  Synthetic oligonucleotide
ccggtcccatccgacc

SEQ ID NO: 593 - DNA, 16 bp, Artificial sequence
  Synthetic oligonucleotide
gtggtgcgccgtcata

SEQ ID NO: 594 - DNA, 16 bp, Artificial sequence
  Synthetic oligonucleotide
caagctggttacaaga

SEQ ID NO: 595 - DNA, 16 bp, Artificial sequence
  Synthetic oligonucleotide
atgtagagttggccca

SEQ ID NO: 596 - DNA, 16 bp, Artificial sequence
  Synthetic oligonucleotide
catacttccgcgcaca

SEQ ID NO: 597 - DNA, 16 bp, Artificial sequence
  Synthetic oligonucleotide
acgcagtgagaccacc

SEQ ID NO: 598 - DNA, 16 bp, Artificial sequence
  Synthetic oligonucleotide
cagtggtaaaaagtgg

SEQ ID NO: 599 - DNA, 16 bp, Artificial sequence
  Synthetic oligonucleotide
ttgcaagtacagtgag

SEQ ID NO: 600 - DNA, 16 bp, Artificial sequence
  Synthetic oligonucleotide
gttaaatgggctgtca

SEQ ID NO: 601 - DNA, 16 bp, Artificial sequence
  Synthetic oligonucleotide
cgccggtacactcctt

SEQ ID NO: 602 - DNA, 16 bp, Artificial sequence
  Synthetic oligonucleotide
ggcatactccatttac

SEQ ID NO: 603 - DNA, 16 bp, Artificial sequence
  Synthetic oligonucleotide
gcacaggtgcccgcag

SEQ ID NO: 604 - DNA, 16 bp, Artificial sequence
  Synthetic oligonucleotide
ggcactacttccagcg

SEQ ID NO: 605 - DNA, 16 bp, Artificial sequence
  Synthetic oligonucleotide
gcccgctggacagacc

SEQ ID NO: 606 - DNA, 16 bp, Artificial sequence
  Synthetic oligonucleotide
ctcaatcctgagaccc

SEQ ID NO: 607 - DNA, 16 bp, Artificial sequence
  Synthetic oligonucleotide
ggattagccaccttgg

SEQ ID NO: 608 - DNA, 16 bp, Artificial sequence
  Synthetic oligonucleotide
cctaatagctccctcc

SEQ ID NO: 609 - DNA, 16 bp, Artificial sequence
  Synthetic oligonucleotide
tctaaagtctgtcccc

SEQ ID NO: 610 - DNA, 16 bp, Artificial sequence
  Synthetic oligonucleotide
gccaaggaatctactc

SEQ ID NO: 611 - DNA, 16 bp, Artificial sequence
  Synthetic oligonucleotide
actcaggcagtgccaa

SEQ ID NO: 612 - DNA, 16 bp, Artificial sequence
  Synthetic oligonucleotide
ctccacttcggtaggg

SEQ ID NO: 613 - DNA, 16 bp, Artificial sequence
  Synthetic oligonucleotide
tgttaagggcaagtta

SEQ ID NO: 614 - DNA, 16 bp, Artificial sequence
  Synthetic oligonucleotide
accaatagcagagtgc

SEQ ID NO: 615 - DNA, 16 bp, Artificial sequence
  Synthetic oligonucleotide
gagtaggccagccctt

SEQ ID NO: 616 - DNA, 16 bp, Artificial sequence
  Synthetic oligonucleotide
cgccatttggcggatg

SEQ ID NO: 617 - DNA, 16 bp, Artificial sequence
  Synthetic oligonucleotide
ggccgctaagctggtt

SEQ ID NO: 618 - DNA, 16 bp, Artificial sequence
  Synthetic oligonucleotide
gggagagcgaagtcca

SEQ ID NO: 619 - DNA, 16 bp, Artificial sequence
  Synthetic oligonucleotide
atggattgatgagcaa

SEQ ID NO: 620 - DNA, 16 bp, Artificial sequence
  Synthetic oligonucleotide
ggagaggcgacagcag

SEQ ID NO: 621 - DNA, 16 bp, Artificial sequence
  Synthetic oligonucleotide
ggctaggtcctagatg

SEQ ID NO: 622 - DNA, 16 bp, Artificial sequence
  Synthetic oligonucleotide
gggataggtcagcccc

SEQ ID NO: 623 - DNA, 16 bp, Artificial sequence
  Synthetic oligonucleotide
gtgtaatactctgcta

SEQ ID NO: 624 - DNA, 16 bp, Artificial sequence
  Synthetic oligonucleotide
ggccgtaaagggcttg

SEQ ID NO: 625 - DNA, 16 bp, Artificial sequence
  Synthetic oligonucleotide
aggcagttcggcctgt

SEQ ID NO: 626 - DNA, 16 bp, Artificial sequence
  Synthetic oligonucleotide
cccaaggtgtagttgc

SEQ ID NO: 627 - DNA, 16 bp, Artificial sequence
  Synthetic oligonucleotide
tgggctgcccggagca

SEQ ID NO: 628 - DNA, 16 bp, Artificial sequence
  Synthetic oligonucleotide
ctggcggatggagcgg

SEQ ID NO: 629 - DNA, 16 bp, Artificial sequence
  Synthetic oligonucleotide
agacagccgcgagatg

SEQ ID NO: 630 - DNA, 16 bp, Artificial sequence
  Synthetic oligonucleotide
caaggcccaacctgag

SEQ ID NO: 631 - DNA, 16 bp, Artificial sequence
  Synthetic oligonucleotide
ctgtagggagtcccct

SEQ ID NO: 632 - DNA, 16 bp, Artificial sequence
  Synthetic oligonucleotide
gctgcagtgccaactt

SEQ ID NO: 633 - DNA, 16 bp, Artificial sequence
  Synthetic oligonucleotide
ctgtttgggctggcgg

SEQ ID NO: 634 - DNA, 16 bp, Artificial sequence
  Synthetic oligonucleotide
tacgctgctcagaccc

SEQ ID NO: 635 - DNA, 16 bp, Artificial sequence
  Synthetic oligonucleotide
tctctcgagacccact

SEQ ID NO: 636 - DNA, 16 bp, Artificial sequence
  Synthetic oligonucleotide
gtggcgggtggactgg

SEQ ID NO: 637 - DNA, 16 bp, Artificial sequence
  Synthetic oligonucleotide
gcatgtcaaagtagga

SEQ ID NO: 638 - DNA, 16 bp, Artificial sequence
  Synthetic oligonucleotide
tgaccgggcactgctc

SEQ ID NO: 639 - DNA, 16 bp, Artificial sequence
  Synthetic oligonucleotide
aaggtcagcccgccgg

SEQ ID NO: 640 - DNA, 16 bp, Artificial sequence
  Synthetic oligonucleotide
agcacttcgcccacca

SEQ ID NO: 641 - DNA, 16 bp, Artificial sequence
  Synthetic oligonucleotide
ttgcaggccgtctcga

SEQ ID NO: 642 - DNA, 16 bp, Artificial sequence
  Synthetic oligonucleotide
tccagtccatgggatc

SEQ ID NO: 643 - DNA, 16 bp, Artificial sequence
  Synthetic oligonucleotide
gacatggcgcacagct

SEQ ID NO: 644 - DNA, 16 bp, Artificial sequence
  Synthetic oligonucleotide
ctgacttccagatgtc

SEQ ID NO: 645 - DNA, 16 bp, Artificial sequence
  Synthetic oligonucleotide
aggtgaagtccgctct

SEQ ID NO: 646 - DNA, 16 bp, Artificial sequence
  Synthetic oligonucleotide
tcgaggcacagtagtg

SEQ ID NO: 647 - DNA, 16 bp, Artificial sequence
  Synthetic oligonucleotide
cctcgctgtcggtcca

SEQ ID NO: 648 - DNA, 16 bp, Artificial sequence
  Synthetic oligonucleotide
ctaatgaagcggccat

SEQ ID NO: 649 - DNA, 16 bp, Artificial sequence
  Synthetic oligonucleotide
gggagatgtctggctt

SEQ ID NO: 650 - DNA, 16 bp, Artificial sequence
  Synthetic oligonucleotide
gggcagttggttgccc

SEQ ID NO: 651 - DNA, 16 bp, Artificial sequence
  Synthetic oligonucleotide
actgcccttctgtagg

SEQ ID NO: 652 - DNA, 16 bp, Artificial sequence
  Synthetic oligonucleotide
cagttctctagtatct

SEQ ID NO: 653 - DNA, 16 bp, Artificial sequence
  Synthetic oligonucleotide
caaccagtctcaggcg

SEQ ID NO: 654 - DNA, 16 bp, Artificial sequence
  Synthetic oligonucleotide
gctaccccaggagcag

SEQ ID NO: 655 - DNA, 16 bp, Artificial sequence
  Synthetic oligonucleotide
ggaggagctaggtccc

SEQ ID NO: 656 - DNA, 16 bp, Artificial sequence
  Synthetic oligonucleotide
tatcaggaccggttcc

SEQ ID NO: 657 - DNA, 16 bp, Artificial sequence
  Synthetic oligonucleotide
tgtcctgacaggctaa

SEQ ID NO: 658 - DNA, 16 bp, Artificial sequence
  Synthetic oligonucleotide
ggtgttaggacaaagt

SEQ ID NO: 659 - DNA, 16 bp, Artificial sequence
  Synthetic oligonucleotide
aaaaacattcctgcgc

SEQ ID NO: 660 - DNA, 16 bp, Artificial sequence
  Synthetic oligonucleotide
acacctggttgttggt

SEQ ID NO: 661 - DNA, 16 bp, Artificial sequence
  Synthetic oligonucleotide
ccatctgccgtgtttc

SEQ ID NO: 662 - DNA, 16 bp, Artificial sequence
  Synthetic oligonucleotide
ctgtctcccgagaggt

SEQ ID NO: 663 - DNA, 16 bp, Artificial sequence
  Synthetic oligonucleotide
caggacagcgatgtga

SEQ ID NO: 664 - DNA, 16 bp, Artificial sequence
  Synthetic oligonucleotide
gccgatcctcttggcc

SEQ ID NO: 665 - DNA, 16 bp, Artificial sequence
  Synthetic oligonucleotide
accggagctctgctgc

SEQ ID NO: 666 - DNA, 16 bp, Artificial sequence
  Synthetic oligonucleotide
gagaacacacggatgt

SEQ ID NO: 667 - DNA, 16 bp, Artificial sequence
  Synthetic oligonucleotide
agtcacactaaggtcc

SEQ ID NO: 668 - DNA, 16 bp, Artificial sequence
  Synthetic oligonucleotide
cccggtcccatccgac

SEQ ID NO: 669 - DNA, 16 bp, Artificial sequence
  Synthetic oligonucleotide
ggtggtgcgccgtcat

SEQ ID NO: 670 - DNA, 16 bp, Artificial sequence
  Synthetic oligonucleotide
gcaagctggttacaag

SEQ ID NO: 671 - DNA, 16 bp, Artificial sequence
  Synthetic oligonucleotide
cagcatgtagagttgg

SEQ ID NO: 672 - DNA, 16 bp, Artificial sequence
  Synthetic oligonucleotide
acacatacttccgcgc

SEQ ID NO: 673 - DNA, 16 bp, Artificial sequence
  Synthetic oligonucleotide
ccctacgcagtgagac

SEQ ID NO: 674 - DNA, 16 bp, Artificial sequence
  Synthetic oligonucleotide
caacgacctcagtggt

SEQ ID NO: 675 - DNA, 16 bp, Artificial sequence
  Synthetic oligonucleotide
gacaaggtgttgcaag

SEQ ID NO: 676 - DNA, 16 bp, Artificial sequence
  Synthetic oligonucleotide
ctgttaaatgggctgt

SEQ ID NO: 677 - DNA, 16 bp, Artificial sequence
  Synthetic oligonucleotide
aatcgccggtacactc

SEQ ID NO: 678 - DNA, 16 bp, Artificial sequence
  Synthetic oligonucleotide
agcaaaggcatactcc

SEQ ID NO: 679 - DNA, 16 bp, Artificial sequence
  Synthetic oligonucleotide
agcacaggtgcccgca

SEQ ID NO: 680 - DNA, 16 bp, Artificial sequence
  Synthetic oligonucleotide
cctcactggcactact

SEQ ID NO: 681 - DNA, 16 bp, Artificial sequence
  Synthetic oligonucleotide
gagcaccacttctgcc

SEQ ID NO: 682 - DNA, 16 bp, Artificial sequence
  Synthetic oligonucleotide
ggtaaatgtatcctca

SEQ ID NO: 683 - DNA, 16 bp, Artificial sequence
  Synthetic oligonucleotide
ggattaaggctcagcg

SEQ ID NO: 684 - DNA, 16 bp, Artificial sequence
  Synthetic oligonucleotide
gggcacaacatggcta

SEQ ID NO: 685 - DNA, 16 bp, Artificial sequence
  Synthetic oligonucleotide
atagatgcggacagtg

SEQ ID NO: 686 - DNA, 16 bp, Artificial sequence
  Synthetic oligonucleotide
ctatacctaaatgcca

SEQ ID NO: 687 - DNA, 16 bp, Artificial sequence
  Synthetic oligonucleotide
tttactcaggcagtgc

SEQ ID NO: 688 - DNA, 16 bp, Artificial sequence
  Synthetic oligonucleotide
ctccgtatgcagctgg

SEQ ID NO: 689 - DNA, 16 bp, Artificial sequence
  Synthetic oligonucleotide
ataaacctgttaaggg

SEQ ID NO: 690 - DNA, 16 bp, Artificial sequence
  Synthetic oligonucleotide
ggccgccccggcttgg

SEQ ID NO: 691 - DNA, 16 bp, Artificial sequence
  Synthetic oligonucleotide
gggtagaaaccctccc

SEQ ID NO: 692 - DNA, 16 bp, Artificial sequence
  Synthetic oligonucleotide
atgtactgtgcttaaa

SEQ ID NO: 693 - DNA, 16 bp, Artificial sequence
  Synthetic oligonucleotide
tgtctacggaaatgaa

SEQ ID NO: 694 - DNA, 16 bp, Artificial sequence
  Synthetic oligonucleotide
tagcaaatgttgtggg

SEQ ID NO: 695 - DNA, 16 bp, Artificial sequence
  Synthetic oligonucleotide
tgctatcctagcatct

SEQ ID NO: 696 - DNA, 16 bp, Artificial sequence
  Synthetic oligonucleotide
agctggagaggcgaca

SEQ ID NO: 697 - DNA, 16 bp, Artificial sequence
  Synthetic oligonucleotide
gggctagacgcacagg

SEQ ID NO: 698 - DNA, 16 bp, Artificial sequence
  Synthetic oligonucleotide
acccatgggaacctgt

SEQ ID NO: 699 - DNA, 16 bp, Artificial sequence
  Synthetic oligonucleotide
gagcagtgtaatactc

SEQ ID NO: 700 - DNA, 16 bp, Artificial sequence
  Synthetic oligonucleotide
ccccgagggtggagga

SEQ ID NO: 701 - DNA, 16 bp, Artificial sequence
  Synthetic oligonucleotide
tctcaggcagttcggc

SEQ ID NO: 702 - DNA, 16 bp, Artificial sequence
  Synthetic oligonucleotide
agggaccccgtgcaga

SEQ ID NO: 703 - DNA, 16 bp, Artificial sequence
  Synthetic oligonucleotide
gcttgcaggccgtctc

SEQ ID NO: 704 - DNA, 16 bp, Artificial sequence
  Synthetic oligonucleotide
gctgacttccagatgt

SEQ ID NO: 705 - DNA, 16 bp, Artificial sequence
  Synthetic oligonucleotide
atgggctgcccggagc

SEQ ID NO: 706 - DNA, 16 bp, Artificial sequence
  Synthetic oligonucleotide
tactggcggatggagc

SEQ ID NO: 707 - DNA, 16 bp, Artificial sequence
  Synthetic oligonucleotide
cagacagccgcgagat

SEQ ID NO: 708 - DNA, 16 bp, Artificial sequence
  Synthetic oligonucleotide
gcaaggcccaacctga

SEQ ID NO: 709 - DNA, 16 bp, Artificial sequence
  Synthetic oligonucleotide
gcctgtagggagtccc

SEQ ID NO: 710 - DNA, 16 bp, Artificial sequence
  Synthetic oligonucleotide
tgttagctgcctggtg

SEQ ID NO: 711 - DNA, 16 bp, Artificial sequence
  Synthetic oligonucleotide
tgctgtttgggctggc

SEQ ID NO: 712 - DNA, 16 bp, Artificial sequence
  Synthetic oligonucleotide
gatacgctgctcagac

SEQ ID NO: 713 - DNA, 16 bp, Artificial sequence
  Synthetic oligonucleotide
gtctctcgagacccac

SEQ ID NO: 714 - DNA, 16 bp, Artificial sequence
  Synthetic oligonucleotide
aggccctgctcgggcg

SEQ ID NO: 715 - DNA, 16 bp, Artificial sequence
  Synthetic oligonucleotide
gtacagcatgtcaaag

SEQ ID NO: 716 - DNA, 16 bp, Artificial sequence
  Synthetic oligonucleotide
aatgaccgggcactgc

SEQ ID NO: 717 - DNA, 16 bp, Artificial sequence
  Synthetic oligonucleotide
ccaaggtcagcccgcc

SEQ ID NO: 718 - DNA, 16 bp, Artificial sequence
  Synthetic oligonucleotide
tgagcacttcgcccac

SEQ ID NO: 719 - DNA, 16 bp, Artificial sequence
  Synthetic oligonucleotide
tctgcacattgctggg

SEQ ID NO: 720 - DNA, 16 bp, Artificial sequence
  Synthetic oligonucleotide
cgacatggcgcacagc

SEQ ID NO: 721 - DNA, 16 bp, Artificial sequence
  Synthetic oligonucleotide
ccaggtgaagtccgct

SEQ ID NO: 722 - DNA, 16 bp, Artificial sequence
  Synthetic oligonucleotide
gtcgaggcacagtagt

SEQ ID NO: 723 - DNA, 16 bp, Artificial sequence
  Synthetic oligonucleotide
cacctcgctgtcggtc

SEQ ID NO: 724 - DNA, 16 bp, Artificial sequence
  Synthetic oligonucleotide
acctaatgaagcggcc

SEQ ID NO: 725 - DNA, 16 bp, Artificial sequence
  Synthetic oligonucleotide
actggtagacgaggcg

SEQ ID NO: 726 - DNA, 16 bp, Artificial sequence
  Synthetic oligonucleotide
gacccatatccccctg

SEQ ID NO: 727 - DNA, 16 bp, Artificial sequence
  Synthetic oligonucleotide
tgtcgagtcactgccc

SEQ ID NO: 728 - DNA, 16 bp, Artificial sequence
  Synthetic oligonucleotide
tcagttctctagtatc

SEQ ID NO: 729 - DNA, 16 bp, Artificial sequence
  Synthetic oligonucleotide
gcaaccagtctcaggc

SEQ ID NO: 730 - DNA, 16 bp, Artificial sequence
  Synthetic oligonucleotide
tgctaccccaggagca

SEQ ID NO: 731 - DNA, 16 bp, Artificial sequence
  Synthetic oligonucleotide
aggaggagctaggtcc

SEQ ID NO: 732 - DNA, 16 bp, Artificial sequence
  Synthetic oligonucleotide
ttatcaggaccggttc

SEQ ID NO: 733 - DNA, 16 bp, Artificial sequence
  Synthetic oligonucleotide
ctgtcctgacaggcta

SEQ ID NO: 734 - DNA, 16 bp, Artificial sequence
  Synthetic oligonucleotide
gggtgttaggacaaag

SEQ ID NO: 735 - DNA, 16 bp, Artificial sequence
  Synthetic oligonucleotide
cttgatgggctgaagg

SEQ ID NO: 736 - DNA, 16 bp, Artificial sequence
  Synthetic oligonucleotide
cacacctggttgttgg

SEQ ID NO: 737 - DNA, 16 bp, Artificial sequence
  Synthetic oligonucleotide
tccatctgccgtgttt

SEQ ID NO: 738 - DNA, 16 bp, Artificial sequence
  Synthetic oligonucleotide
actgtctcccgagagg

SEQ ID NO: 739 - DNA, 16 bp, Artificial sequence
  Synthetic oligonucleotide
gcaggacagcgatgtg

SEQ ID NO: 740 - DNA, 16 bp, Artificial sequence
  Synthetic oligonucleotide
ggccgatcctcttggc

SEQ ID NO: 741 - DNA, 16 bp, Artificial sequence
  Synthetic oligonucleotide
caccggagctctgctg

SEQ ID NO: 742 - DNA, 16 bp, Artificial sequence
  Synthetic oligonucleotide
gggcatgagaacacac

SEQ ID NO: 743 - DNA, 16 bp, Artificial sequence
  Synthetic oligonucleotide
gagtcacactaaggtc

SEQ ID NO: 744 - DNA, 16 bp, Artificial sequence
  Synthetic oligonucleotide
tcccggtcccatccga

SEQ ID NO: 745 - DNA, 16 bp, Artificial sequence
  Synthetic oligonucleotide
tggtggtgcgccgtca

SEQ ID NO: 746 - DNA, 16 bp, Artificial sequence
  Synthetic oligonucleotide
ggcaagctggttacaa

SEQ ID NO: 747 - DNA, 16 bp, Artificial sequence
  Synthetic oligonucleotide
tgcacggcggcctccc

SEQ ID NO: 748 - DNA, 16 bp, Artificial sequence
  Synthetic oligonucleotide
gcaacacgcacgcgca

SEQ ID NO: 749 - DNA, 16 bp, Artificial sequence
  Synthetic oligonucleotide
ctcaaaggcgagggtg

SEQ ID NO: 750 - DNA, 16 bp, Artificial sequence
  Synthetic oligonucleotide
ctcacaacgacctcag

SEQ ID NO: 751 - DNA, 16 bp, Artificial sequence
  Synthetic oligonucleotide
ctaaccttgtttcaca

SEQ ID NO: 752 - DNA, 16 bp, Artificial sequence
  Synthetic oligonucleotide
gaaaaggtttgatccc

SEQ ID NO: 753 - DNA, 16 bp, Artificial sequence
  Synthetic oligonucleotide
ccaaatcgccggtaca

SEQ ID NO: 754 - DNA, 16 bp, Artificial sequence
  Synthetic oligonucleotide
acgcagaggtggacac

SEQ ID NO: 755 - DNA, 16 bp, Artificial sequence
  Synthetic oligonucleotide
ccccacagcagttgcc

SEQ ID NO: 756 - DNA, 16 bp, Artificial sequence
  Synthetic oligonucleotide
ctgcatgggcagcctg

SEQ ID NO: 757 - DNA, 16 bp, Artificial sequence
  Synthetic oligonucleotide
ttccttacggccctcc

SEQ ID NO: 758 - DNA, 16 bp, Artificial sequence
  Synthetic oligonucleotide
ccatatcctgcttggt

SEQ ID NO: 759 - DNA, 16 bp, Artificial sequence
  Synthetic oligonucleotide
ctggattaaggctcag

SEQ ID NO: 760 - DNA, 16 bp, Artificial sequence
  Synthetic oligonucleotide
tttcatacctgcccct

SEQ ID NO: 761 - DNA, 16 bp, Artificial sequence
  Synthetic oligonucleotide
gctttatagatgcgga

SEQ ID NO: 762 - DNA, 16 bp, Artificial sequence
  Synthetic oligonucleotide
ccctatacctaaatgc

SEQ ID NO: 763 - DNA, 16 bp, Artificial sequence
  Synthetic oligonucleotide
tatttactcaggcagt

SEQ ID NO: 764 - DNA, 16 bp, Artificial sequence
  Synthetic oligonucleotide
cgcgcagcctccgtat

SEQ ID NO: 765 - DNA, 16 bp, Artificial sequence
  Synthetic oligonucleotide
agataaacctgttaag

SEQ ID NO: 766 - DNA, 16 bp, Artificial sequence
  Synthetic oligonucleotide
acacaagcagtcagag

SEQ ID NO: 767 - DNA, 16 bp, Artificial sequence
  Synthetic oligonucleotide
acgagaggaacaaggc

SEQ ID NO: 768 - DNA, 16 bp, Artificial sequence
  Synthetic oligonucleotide
cacacatgtactgtgc

SEQ ID NO: 769 - DNA, 16 bp, Artificial sequence
  Synthetic oligonucleotide
tgtgtctacggaaatg

SEQ ID NO: 770 - DNA, 16 bp, Artificial sequence
  Synthetic oligonucleotide
tgccatctgagccaag

SEQ ID NO: 771 - DNA, 16 bp, Artificial sequence
  Synthetic oligonucleotide
gttatattcaaggtgc

SEQ ID NO: 772 - DNA, 16 bp, Artificial sequence
  Synthetic oligonucleotide
ggacatgggtcaggac

SEQ ID NO: 773 - DNA, 16 bp, Artificial sequence
  Synthetic oligonucleotide
aaagggctagacgcac

SEQ ID NO: 774 - DNA, 16 bp, Artificial sequence
  Synthetic oligonucleotide
cctgagagcaccaccc

SEQ ID NO: 775 - DNA, 16 bp, Artificial sequence
  Synthetic oligonucleotide
tgcagagcagtgtaat

SEQ ID NO: 776 - DNA, 16 bp, Artificial sequence
  Synthetic oligonucleotide
ccacagtagtgaatcg

SEQ ID NO: 777 - DNA, 16 bp, Artificial sequence
  Synthetic oligonucleotide
ccccattacaggtgtc

SEQ ID NO: 778 - DNA, 16 bp, Artificial sequence
  Synthetic oligonucleotide
ccaagggaccccgtgc

SEQ ID NO: 779 - DNA, 16 bp, Artificial sequence
  Synthetic oligonucleotide
aatactggcggatgga

SEQ ID NO: 780 - DNA, 16 bp, Artificial sequence
  Synthetic oligonucleotide
gtcagacagccgcgag

SEQ ID NO: 781 - DNA, 16 bp, Artificial sequence
  Synthetic oligonucleotide
tggcaaggcccaacct

SEQ ID NO: 782 - DNA, 16 bp, Artificial sequence
  Synthetic oligonucleotide
tgcctgtagggagtcc

SEQ ID NO: 783 - DNA, 16 bp, Artificial sequence
  Synthetic oligonucleotide
tctgttagctgcctgg

SEQ ID NO: 784 - DNA, 16 bp, Artificial sequence
  Synthetic oligonucleotide
ccgctgctgtttgggc

SEQ ID NO: 785 - DNA, 16 bp, Artificial sequence
  Synthetic oligonucleotide
ggatacgctgctcaga

SEQ ID NO: 786 - DNA, 16 bp, Artificial sequence
  Synthetic oligonucleotide
cgtctctcgagaccca

SEQ ID NO: 787 - DNA, 16 bp, Artificial sequence
  Synthetic oligonucleotide
acaggccctgctcggg

SEQ ID NO: 788 - DNA, 16 bp, Artificial sequence
  Synthetic oligonucleotide
tcagggtacagcatgt

SEQ ID NO: 789 - DNA, 16 bp, Artificial sequence
  Synthetic oligonucleotide
caatgaccgggcactg

SEQ ID NO: 790 - DNA, 16 bp, Artificial sequence
  Synthetic oligonucleotide
ctccaaggtcagcccg

SEQ ID NO: 791 - DNA, 16 bp, Artificial sequence
  Synthetic oligonucleotide
ttgagcacttcgccca

SEQ ID NO: 792 - DNA, 16 bp, Artificial sequence
  Synthetic oligonucleotide
cagcttgcaggccgtc

SEQ ID NO: 793 - DNA, 16 bp, Artificial sequence
  Synthetic oligonucleotide
attggtgctctgtcca

SEQ ID NO: 794 - DNA, 16 bp, Artificial sequence
  Synthetic oligonucleotide
ccgacatggcgcacag

SEQ ID NO: 795 - DNA, 16 bp, Artificial sequence
  Synthetic oligonucleotide
cgctgacttccagatg

SEQ ID NO: 796 - DNA, 16 bp, Artificial sequence
  Synthetic oligonucleotide
ccccaggtgaagtccg

SEQ ID NO: 797 - DNA, 16 bp, Artificial sequence
  Synthetic oligonucleotide
tggtcgaggcacagta

SEQ ID NO: 798 - DNA, 16 bp, Artificial sequence
  Synthetic oligonucleotide
ccacctcgctgtcggt

SEQ ID NO: 799 - DNA, 16 bp, Artificial sequence
  Synthetic oligonucleotide
gatgggctgcccggag

SEQ ID NO: 800 - DNA, 16 bp, Artificial sequence
  Synthetic oligonucleotide
ccacctaatgaagcgg

SEQ ID NO: 801 - DNA, 16 bp, Artificial sequence
  Synthetic oligonucleotide
gaactggtagacgagg

SEQ ID NO: 802 - DNA, 16 bp, Artificial sequence
  Synthetic oligonucleotide
ggacccatatccccct

SEQ ID NO: 803 - DNA, 16 bp, Artificial sequence
  Synthetic oligonucleotide
ttgtcgagtcactgcc

SEQ ID NO: 804 - DNA, 16 bp, Artificial sequence
  Synthetic oligonucleotide
cgcaaccagtctcagg

SEQ ID NO: 805 - DNA, 16 bp, Artificial sequence
  Synthetic oligonucleotide
ttgctaccccaggagc

SEQ ID NO: 806 - DNA, 16 bp, Artificial sequence
  Synthetic oligonucleotide
acacatcccccttttg

SEQ ID NO: 807 - DNA, 16 bp, Artificial sequence
  Synthetic oligonucleotide
gttatcaggaccggtt

SEQ ID NO: 808 - DNA, 16 bp, Artificial sequence
  Synthetic oligonucleotide
gaactgtcctgacagg

SEQ ID NO: 809 - DNA, 16 bp, Artificial sequence
  Synthetic oligonucleotide
tggagcacacctccag

SEQ ID NO: 810 - DNA, 16 bp, Artificial sequence
  Synthetic oligonucleotide
tcttgatgggctgaag

SEQ ID NO: 811 - DNA, 16 bp, Artificial sequence
  Synthetic oligonucleotide
acacacctggttgttg

SEQ ID NO: 812 - DNA, 16 bp, Artificial sequence
  Synthetic oligonucleotide
gtctccatctgccgtg

SEQ ID NO: 813 - DNA, 16 bp, Artificial sequence
  Synthetic oligonucleotide
cactgtctcccgagag

SEQ ID NO: 814 - DNA, 16 bp, Artificial sequence
  Synthetic oligonucleotide
ggcaggacagcgatgt

SEQ ID NO: 815 - DNA, 16 bp, Artificial sequence
  Synthetic oligonucleotide
tggccgatcctcttgg

SEQ ID NO: 816 - DNA, 16 bp, Artificial sequence
  Synthetic oligonucleotide
tcaccggagctctgct

SEQ ID NO: 817 - DNA, 16 bp, Artificial sequence
  Synthetic oligonucleotide
agggcatgagaacaca

SEQ ID NO: 818 - DNA, 16 bp, Artificial sequence
  Synthetic oligonucleotide
ggatgagcctctccct

SEQ ID NO: 819 - DNA, 16 bp, Artificial sequence
  Synthetic oligonucleotide
agagtcacactaaggt

SEQ ID NO: 820 - DNA, 16 bp, Artificial sequence
  Synthetic oligonucleotide
gtcccggtcccatccg

SEQ ID NO: 821 - DNA, 16 bp, Artificial sequence
  Synthetic oligonucleotide
ctggtggtgcgccgtc

SEQ ID NO: 822 - DNA, 16 bp, Artificial sequence
  Synthetic oligonucleotide
aggcaagctggttaca

SEQ ID NO: 823 - DNA, 16 bp, Artificial sequence
  Synthetic oligonucleotide
ctgcatctgcacggcg

SEQ ID NO: 824 - DNA, 16 bp, Artificial sequence
  Synthetic oligonucleotide
atgcaacacgcacgcg

SEQ ID NO: 825 - DNA, 16 bp, Artificial sequence
  Synthetic oligonucleotide
gtacatgcactgtcag

SEQ ID NO: 826 - DNA, 16 bp, Artificial sequence
  Synthetic oligonucleotide
tatactcacaacgacc

SEQ ID NO: 827 - DNA, 16 bp, Artificial sequence
  Synthetic oligonucleotide
ggcaatagccttgtct

SEQ ID NO: 828 - DNA, 16 bp, Artificial sequence
  Synthetic oligonucleotide
tgacaggccactcgct

SEQ ID NO: 829 - DNA, 16 bp, Artificial sequence
  Synthetic oligonucleotide
ccccaaatcgccggta

SEQ ID NO: 830 - DNA, 16 bp, Artificial sequence
  Synthetic oligonucleotide
cttaaagaaggatggt

SEQ ID NO: 831 - DNA, 16 bp, Artificial sequence
  Synthetic oligonucleotide
cctaaggttgcccctg

SEQ ID NO: 832 - DNA, 16 bp, Artificial sequence
  Synthetic oligonucleotide
acacattgcatcagtg

SEQ ID NO: 833 - DNA, 16 bp, Artificial sequence
  Synthetic oligonucleotide
agagaagtgccagacc

SEQ ID NO: 834 - DNA, 16 bp, Artificial sequence
  Synthetic oligonucleotide
acccaggtcgctgtgc

SEQ ID NO: 835 - DNA, 16 bp, Artificial sequence
  Synthetic oligonucleotide
ggattaagccacatgt

SEQ ID NO: 836 - DNA, 16 bp, Artificial sequence
  Synthetic oligonucleotide
tggcatttcatacctg

SEQ ID NO: 837 - DNA, 16 bp, Artificial sequence
  Synthetic oligonucleotide
ccacatcacccgcttt

SEQ ID NO: 838 - DNA, 16 bp, Artificial sequence
  Synthetic oligonucleotide
ctataccccacattcc

SEQ ID NO: 839 - DNA, 16 bp, Artificial sequence
  Synthetic oligonucleotide
gttacatggcagccct

SEQ ID NO: 840 - DNA, 16 bp, Artificial sequence
  Synthetic oligonucleotide
gactgacccgcgcagc

SEQ ID NO: 841 - DNA, 16 bp, Artificial sequence
  Synthetic oligonucleotide
atacagagaaccagtt

SEQ ID NO: 842 - DNA, 16 bp, Artificial sequence
  Synthetic oligonucleotide
cctcaacacaagcagt

SEQ ID NO: 843 - DNA, 16 bp, Artificial sequence
  Synthetic oligonucleotide
aagacgagaggaacaa

SEQ ID NO: 844 - DNA, 16 bp, Artificial sequence
  Synthetic oligonucleotide
atagatcgctccctca

SEQ ID NO: 845 - DNA, 16 bp, Artificial sequence
  Synthetic oligonucleotide
tacggaagcaggcaca

SEQ ID NO: 846 - DNA, 16 bp, Artificial sequence
  Synthetic oligonucleotide
gcggatggtgccatct

SEQ ID NO: 847 - DNA, 16 bp, Artificial sequence
  Synthetic oligonucleotide
gagcatcagttatatt

SEQ ID NO: 848 - DNA, 16 bp, Artificial sequence
  Synthetic oligonucleotide
acagagttcagtgctg

SEQ ID NO: 849 - DNA, 16 bp, Artificial sequence
  Synthetic oligonucleotide
cacggaataaagggct

SEQ ID NO: 850 - DNA, 16 bp, Artificial sequence
  Synthetic oligonucleotide
gggcaacctcctagcc

SEQ ID NO: 851 - DNA, 16 bp, Artificial sequence
  Synthetic oligonucleotide
acatactgtggtgtgc

SEQ ID NO: 852 - DNA, 16 bp, Artificial sequence
  Synthetic oligonucleotide
gctcaccacagtagtg

SEQ ID NO: 853 - DNA, 16 bp, Artificial sequence
  Synthetic oligonucleotide
tggcaagagcatccct

SEQ ID NO: 854 - DNA, 16 bp, Artificial sequence
  Synthetic oligonucleotide
aaccaagggaccccgt

SEQ ID NO: 855 - DNA, 16 bp, Artificial sequence
  Synthetic oligonucleotide
gtaatactggcggatg

SEQ ID NO: 856 - DNA, 16 bp, Artificial sequence
  Synthetic oligonucleotide
aagtcagacagccgcg

SEQ ID NO: 857 - DNA, 16 bp, Artificial sequence
  Synthetic oligonucleotide
cgtggcaaggcccaac

SEQ ID NO: 858 - DNA, 16 bp, Artificial sequence
  Synthetic oligonucleotide
gtgcctgtagggagtc

SEQ ID NO: 859 - DNA, 16 bp, Artificial sequence
  Synthetic oligonucleotide
gtctgttagctgcctg

SEQ ID NO: 860 - DNA, 16 bp, Artificial sequence
  Synthetic oligonucleotide
gccgctgctgtttggg

SEQ ID NO: 861 - DNA, 16 bp, Artificial sequence
  Synthetic oligonucleotide
cgcgacaccgtgtcgg

SEQ ID NO: 862 - DNA, 16 bp, Artificial sequence
  Synthetic oligonucleotide
cccgtctctcgagacc

SEQ ID NO: 863 - DNA, 16 bp, Artificial sequence
  Synthetic oligonucleotide
gacaggccctgctcgg

SEQ ID NO: 864 - DNA, 16 bp, Artificial sequence
  Synthetic oligonucleotide
ctcagggtacagcatg

SEQ ID NO: 865 - DNA, 16 bp, Artificial sequence
  Synthetic oligonucleotide
tcaatgaccgggcact

SEQ ID NO: 866 - DNA, 16 bp, Artificial sequence
  Synthetic oligonucleotide
cgagtgctcctccaag

SEQ ID NO: 867 - DNA, 16 bp, Artificial sequence
  Synthetic oligonucleotide
ccttgagcacttcgcc

SEQ ID NO: 868 - DNA, 16 bp, Artificial sequence
  Synthetic oligonucleotide
gcagcttgcaggccgt

SEQ ID NO: 869 - DNA, 16 bp, Artificial sequence
  Synthetic oligonucleotide
gtattggtgctctgtc

SEQ ID NO: 870 - DNA, 16 bp, Artificial sequence
  Synthetic oligonucleotide
tccgacatggcgcaca

SEQ ID NO: 871 - DNA, 16 bp, Artificial sequence
  Synthetic oligonucleotide
aggccgctgacttcca

SEQ ID NO: 872 - DNA, 16 bp, Artificial sequence
  Synthetic oligonucleotide
cgccccaggtgaagtc

SEQ ID NO: 873 - DNA, 16 bp, Artificial sequence
  Synthetic oligonucleotide
ctggtcgaggcacagt

SEQ ID NO: 874 - DNA, 16 bp, Artificial sequence
  Synthetic oligonucleotide
agtccacctcgctgtc

SEQ ID NO: 875 - DNA, 16 bp, Artificial sequence
  Synthetic oligonucleotide
gtggatgggctgcccg

SEQ ID NO: 876 - DNA, 16 bp, Artificial sequence
  Synthetic oligonucleotide
agccacctaatgaagc

SEQ ID NO: 877 - DNA, 16 bp, Artificial sequence
  Synthetic oligonucleotide
tgcacgaactggtaga

SEQ ID NO: 878 - DNA, 16 bp, Artificial sequence
  Synthetic oligonucleotide
aggacccatatccccc

SEQ ID NO: 879 - DNA, 16 bp, Artificial sequence
  Synthetic oligonucleotide
tttgtcgagtcactgc

SEQ ID NO: 880 - DNA, 16 bp, Artificial sequence
  Synthetic oligonucleotide
ccgcaaccagtctcag

SEQ ID NO: 881 - DNA, 16 bp, Artificial sequence
  Synthetic oligonucleotide
cttgctaccccaggag

SEQ ID NO: 882 - DNA, 16 bp, Artificial sequence
  Synthetic oligonucleotide
gagacacatccccctt

SEQ ID NO: 883 - DNA, 16 bp, Artificial sequence
  Synthetic oligonucleotide
ggttatcaggaccggt

SEQ ID NO: 884 - DNA, 16 bp, Artificial sequence
  Synthetic oligonucleotide
agaactgtcctgacag

SEQ ID NO: 885 - DNA, 16 bp, Artificial sequence
  Synthetic oligonucleotide
ctggagcacacctcca

SEQ ID NO: 886 - DNA, 16 bp, Artificial sequence
  Synthetic oligonucleotide
atcttgatgggctgaa

SEQ ID NO: 887 - DNA, 16 bp, Artificial sequence
  Synthetic oligonucleotide
cacacacctggttgtt

SEQ ID NO: 888 - DNA, 16 bp, Artificial sequence
  Synthetic oligonucleotide
tgtctccatctgccgt

SEQ ID NO: 889 - DNA, 16 bp, Artificial sequence
  Synthetic oligonucleotide
tcactgtctcccgaga

SEQ ID NO: 890 - DNA, 16 bp, Artificial sequence
  Synthetic oligonucleotide
aggcaggacagcgatg

SEQ ID NO: 891 - DNA, 16 bp, Artificial sequence
  Synthetic oligonucleotide
ttggccgatcctcttg

SEQ ID NO: 892 - DNA, 16 bp, Artificial sequence
  Synthetic oligonucleotide
gtcaccggagctctgc

SEQ ID NO: 893 - DNA, 16 bp, Artificial sequence
  Synthetic oligonucleotide
gagggcatgagaacac

SEQ ID NO: 894 - DNA, 16 bp, Artificial sequence
  Synthetic oligonucleotide
aggatgagcctctccc

SEQ ID NO: 895 - DNA, 16 bp, Artificial sequence
  Synthetic oligonucleotide
cagagtcacactaagg

SEQ ID NO: 896 - DNA, 16 bp, Artificial sequence
  Synthetic oligonucleotide
ggtcccggtcccatcc

SEQ ID NO: 897 - DNA, 16 bp, Artificial sequence
  Synthetic oligonucleotide
cctggtggtgcgccgt

SEQ ID NO: 898 - DNA, 16 bp, Artificial sequence
  Synthetic oligonucleotide
gaggcaagctggttac

SEQ ID NO: 899 - DNA, 16 bp, Artificial sequence
  Synthetic oligonucleotide
cagcaagccgcttgtg

SEQ ID NO: 900 - DNA, 16 bp, Artificial sequence
  Synthetic oligonucleotide
acatgcaacacgcacg

SEQ ID NO: 901 - DNA, 16 bp, Artificial sequence
  Synthetic oligonucleotide
tgcttgtacatgcact

SEQ ID NO: 902 - DNA, 16 bp, Artificial sequence
  Synthetic oligonucleotide
ctttatactcacaacg

SEQ ID NO: 903 - DNA, 16 bp, Artificial sequence
  Synthetic oligonucleotide
taacaggcaatagcct

SEQ ID NO: 904 - DNA, 16 bp, Artificial sequence
  Synthetic oligonucleotide
gaagagttgttccacc

SEQ ID NO: 905 - DNA, 16 bp, Artificial sequence
  Synthetic oligonucleotide
atgcagcccgggtcac

SEQ ID NO: 906 - DNA, 16 bp, Artificial sequence
  Synthetic oligonucleotide
tacgatccatgaccct

SEQ ID NO: 907 - DNA, 16 bp, Artificial sequence
  Synthetic oligonucleotide
ggcagacccggcatct

SEQ ID NO: 908 - DNA, 16 bp, Artificial sequence
  Synthetic oligonucleotide
gaacacattgcatcag

SEQ ID NO: 909 - DNA, 16 bp, Artificial sequence
  Synthetic oligonucleotide
cccaagagaagtgcca

SEQ ID NO: 910 - DNA, 16 bp, Artificial sequence
  Synthetic oligonucleotide
gctaaggacccaggtc

SEQ ID NO: 911 - DNA, 16 bp, Artificial sequence
  Synthetic oligonucleotide
ctcttctggattaagc

SEQ ID NO: 912 - DNA, 16 bp, Artificial sequence
  Synthetic oligonucleotide
atccaagctctaatga

SEQ ID NO: 913 - DNA, 16 bp, Artificial sequence
  Synthetic oligonucleotide
caccagtgccacgccc

SEQ ID NO: 914 - DNA, 16 bp, Artificial sequence
  Synthetic oligonucleotide
ggctcgggctccttca

SEQ ID NO: 915 - DNA, 16 bp, Artificial sequence
  Synthetic oligonucleotide
tcccagtgttacatgg

SEQ ID NO: 916 - DNA, 16 bp, Artificial sequence
  Synthetic oligonucleotide
tgagactgacccgcgc

SEQ ID NO: 917 - DNA, 16 bp, Artificial sequence
  Synthetic oligonucleotide
acagatatacgctcct

SEQ ID NO: 918 - DNA, 16 bp, Artificial sequence
  Synthetic oligonucleotide
ggcctcaacacaagca

SEQ ID NO: 919 - DNA, 16 bp, Artificial sequence
  Synthetic oligonucleotide
ggctatcatcttcacc

SEQ ID NO: 920 - DNA, 16 bp, Artificial sequence
  Synthetic oligonucleotide
gaaatagatcgctccc

SEQ ID NO: 921 - DNA, 16 bp, Artificial sequence
  Synthetic oligonucleotide
tcttacggaagcaggc

SEQ ID NO: 922 - DNA, 16 bp, Artificial sequence
  Synthetic oligonucleotide
cctcatgcggatggtg

SEQ ID NO: 923 - DNA, 16 bp, Artificial sequence
  Synthetic oligonucleotide
cagagaggtagctcat

SEQ ID NO: 924 - DNA, 16 bp, Artificial sequence
  Synthetic oligonucleotide
atgcatgaagacccct

SEQ ID NO: 925 - DNA, 16 bp, Artificial sequence
  Synthetic oligonucleotide
ctccacggaataaagg

SEQ ID NO: 926 - DNA, 16 bp, Artificial sequence
  Synthetic oligonucleotide
gcagagggcaacctcc

SEQ ID NO: 927 - DNA, 16 bp, Artificial sequence
  Synthetic oligonucleotide
caagacatactgtggt

SEQ ID NO: 928 - DNA, 16 bp, Artificial sequence
  Synthetic oligonucleotide
ctccaccctgccgctg

SEQ ID NO: 929 - DNA, 16 bp, Artificial sequence
  Synthetic oligonucleotide
gcccacggctcacttg

SEQ ID NO: 930 - DNA, 16 bp, Artificial sequence
  Synthetic oligonucleotide
gcgaaccaagggaccc

SEQ ID NO: 931 - DNA, 16 bp, Artificial sequence
  Synthetic oligonucleotide
caggccgctgacttcc

SEQ ID NO: 932 - DNA, 16 bp, Artificial sequence
  Synthetic oligonucleotide
tgtaatactggcggat

SEQ ID NO: 933 - DNA, 16 bp, Artificial sequence
  Synthetic oligonucleotide
gaagtcagacagccgc

SEQ ID NO: 934 - DNA, 16 bp, Artificial sequence
  Synthetic oligonucleotide
ccgtggcaaggcccaa

SEQ ID NO: 935 - DNA, 16 bp, Artificial sequence
  Synthetic oligonucleotide
gtggccctctgaggtc

SEQ ID NO: 936 - DNA, 16 bp, Artificial sequence
  Synthetic oligonucleotide
gtgtctgttagctgcc

SEQ ID NO: 937 - DNA, 16 bp, Artificial sequence
  Synthetic oligonucleotide
atgccgctgctgtttg

SEQ ID NO: 938 - DNA, 16 bp, Artificial sequence
  Synthetic oligonucleotide
tccgcgacaccgtgtc

SEQ ID NO: 939 - DNA, 16 bp, Artificial sequence
  Synthetic oligonucleotide
tcccgtctctcgagac

SEQ ID NO: 940 - DNA, 16 bp, Artificial sequence
  Synthetic oligonucleotide
ggacaggccctgctcg

SEQ ID NO: 941 - DNA, 16 bp, Artificial sequence
  Synthetic oligonucleotide
tcctcagggtacagca

SEQ ID NO: 942 - DNA, 16 bp, Artificial sequence
  Synthetic oligonucleotide
tgtcaatgaccgggca

SEQ ID NO: 943 - DNA, 16 bp, Artificial sequence
  Synthetic oligonucleotide
gcgagtgctcctccaa

SEQ ID NO: 944 - DNA, 16 bp, Artificial sequence
  Synthetic oligonucleotide
gtccttgagcacttcg

SEQ ID NO: 945 - DNA, 16 bp, Artificial sequence
  Synthetic oligonucleotide
agcagcttgcaggccg

SEQ ID NO: 946 - DNA, 16 bp, Artificial sequence
  Synthetic oligonucleotide
cggtattggtgctctg

SEQ ID NO: 947 - DNA, 16 bp, Artificial sequence
  Synthetic oligonucleotide
cctccgacatggcgca

SEQ ID NO: 948 - DNA, 16 bp, Artificial sequence
  Synthetic oligonucleotide
tcgccccaggtgaagt

SEQ ID NO: 949 - DNA, 16 bp, Artificial sequence
  Synthetic oligonucleotide
actggtcgaggcacag

SEQ ID NO: 950 - DNA, 16 bp, Artificial sequence
  Synthetic oligonucleotide
atgagtccacctcgct

SEQ ID NO: 951 - DNA, 16 bp, Artificial sequence
  Synthetic oligonucleotide
tagcaactccttgagg

SEQ ID NO: 952 - DNA, 16 bp, Artificial sequence
  Synthetic oligonucleotide
gagccacctaatgaag

SEQ ID NO: 953 - DNA, 16 bp, Artificial sequence
  Synthetic oligonucleotide
gtgcacgaactggtag

SEQ ID NO: 954 - DNA, 16 bp, Artificial sequence
  Synthetic oligonucleotide
agaggacccatatccc

SEQ ID NO: 955 - DNA, 16 bp, Artificial sequence
  Synthetic oligonucleotide
ctttgtcgagtcactg

SEQ ID NO: 956 - DNA, 16 bp, Artificial sequence
  Synthetic oligonucleotide
cccgcaaccagtctca

SEQ ID NO: 957 - DNA, 16 bp, Artificial sequence
  Synthetic oligonucleotide
acttgctaccccagga

SEQ ID NO: 958 - DNA, 16 bp, Artificial sequence
  Synthetic oligonucleotide
agagacacatccccct

SEQ ID NO: 959 - DNA, 16 bp, Artificial sequence
  Synthetic oligonucleotide
gagtgggttattaagg

SEQ ID NO: 960 - DNA, 16 bp, Artificial sequence
  Synthetic oligonucleotide
ggactccaacatcaca

SEQ ID NO: 961 - DNA, 16 bp, Artificial sequence
  Synthetic oligonucleotide
cgccctgatcctcagg

SEQ ID NO: 962 - DNA, 16 bp, Artificial sequence
  Synthetic oligonucleotide
aatcttgatgggctga

SEQ ID NO: 963 - DNA, 16 bp, Artificial sequence
  Synthetic oligonucleotide
tttctgcggcccctcc

SEQ ID NO: 964 - DNA, 16 bp, Artificial sequence
  Synthetic oligonucleotide
tggtgactgctgtctc

SEQ ID NO: 965 - DNA, 16 bp, Artificial sequence
  Synthetic oligonucleotide
ttcactgtctcccgag

SEQ ID NO: 966 - DNA, 16 bp, Artificial sequence
  Synthetic oligonucleotide
caggcaggacagcgat

SEQ ID NO: 967 - DNA, 16 bp, Artificial sequence
  Synthetic oligonucleotide
cttggccgatcctctt

SEQ ID NO: 968 - DNA, 16 bp, Artificial sequence
  Synthetic oligonucleotide
tgtcaccggagctctg

SEQ ID NO: 969 - DNA, 16 bp, Artificial sequence
  Synthetic oligonucleotide
tgagggcatgagaaca

SEQ ID NO: 970 - DNA, 16 bp, Artificial sequence
  Synthetic oligonucleotide
aaggatgagcctctcc

SEQ ID NO: 971 - DNA, 16 bp, Artificial sequence
  Synthetic oligonucleotide
gcagagtcacactaag

SEQ ID NO: 972 - DNA, 16 bp, Artificial sequence
  Synthetic oligonucleotide
aggtcccggtcccatc

SEQ ID NO: 973 - DNA, 16 bp, Artificial sequence
  Synthetic oligonucleotide
tcctggtggtgcgccg

SEQ ID NO: 974 - DNA, 16 bp, Artificial sequence
  Synthetic oligonucleotide
ggaggcaagctggtta

SEQ ID NO: 975 - DNA, 16 bp, Artificial sequence
  Synthetic oligonucleotide
catcaagctccagcaa

SEQ ID NO: 976 - DNA, 16 bp, Artificial sequence
  Synthetic oligonucleotide
gcacatgcaacacgca

SEQ ID NO: 977 - DNA, 16 bp, Artificial sequence
  Synthetic oligonucleotide
ctggatacccccacgg

SEQ ID NO: 978 - DNA, 16 bp, Artificial sequence
  Synthetic oligonucleotide
ggtttcagggctattc

SEQ ID NO: 979 - DNA, 16 bp, Artificial sequence
  Synthetic oligonucleotide
tttaacaggcaatagc

SEQ ID NO: 980 - DNA, 16 bp, Artificial sequence
  Synthetic oligonucleotide
gtgcaaagtttgcttt

SEQ ID NO: 981 - DNA, 16 bp, Artificial sequence
  Synthetic oligonucleotide
catgatgcagcccggg

SEQ ID NO: 982 - DNA, 16 bp, Artificial sequence
  Synthetic oligonucleotide
ggattttacgatccat

SEQ ID NO: 983 - DNA, 16 bp, Artificial sequence
  Synthetic oligonucleotide
tggcagacccggcatc

SEQ ID NO: 984 - DNA, 16 bp, Artificial sequence
  Synthetic oligonucleotide
aggaacacattgcatc

SEQ ID NO: 985 - DNA, 16 bp, Artificial sequence
  Synthetic oligonucleotide
aactagctggacccaa

SEQ ID NO: 986 - DNA, 16 bp, Artificial sequence
  Synthetic oligonucleotide
ccgggaatggagtcac

SEQ ID NO: 987 - DNA, 16 bp, Artificial sequence
  Synthetic oligonucleotide
ctcgagttgatctctt

SEQ ID NO: 988 - DNA, 16 bp, Artificial sequence
  Synthetic oligonucleotide
agggattgacatagtg

SEQ ID NO: 989 - DNA, 16 bp, Artificial sequence
  Synthetic oligonucleotide
gagaacggcactgtga

SEQ ID NO: 990 - DNA, 16 bp, Artificial sequence
  Synthetic oligonucleotide
agagaggtaaatcccc

SEQ ID NO: 991 - DNA, 16 bp, Artificial sequence
  Synthetic oligonucleotide
agcctaggtagaattt

SEQ ID NO: 992 - DNA, 16 bp, Artificial sequence
  Synthetic oligonucleotide
acatttatggtgccct

SEQ ID NO: 993 - DNA, 16 bp, Artificial sequence
  Synthetic oligonucleotide
accaacagatatacgc

SEQ ID NO: 994 - DNA, 16 bp, Artificial sequence
  Synthetic oligonucleotide
cccttagcaactcagc

SEQ ID NO: 995 - DNA, 16 bp, Artificial sequence
  Synthetic oligonucleotide
cctaaaggtggctatc

SEQ ID NO: 996 - DNA, 16 bp, Artificial sequence
  Synthetic oligonucleotide
ctagaaatagatcgct

SEQ ID NO: 997 - DNA, 16 bp, Artificial sequence
  Synthetic oligonucleotide
ccatcttacggaagca

SEQ ID NO: 998 - DNA, 16 bp, Artificial sequence
  Synthetic oligonucleotide
aggtagggatgtgagc

SEQ ID NO: 999 - DNA, 16 bp, Artificial sequence
  Synthetic oligonucleotide
tgcttttcggcccaga

SEQ ID NO: 1000 - DNA, 16 bp, Artificial sequence
  Synthetic oligonucleotide
agggatgcatgaagac

SEQ ID NO: 1001 - DNA, 16 bp, Artificial sequence
  Synthetic oligonucleotide
ttagaaccccaccatt

SEQ ID NO: 1002 - DNA, 16 bp, Artificial sequence
  Synthetic oligonucleotide
tagcagagggcaacct

SEQ ID NO: 1003 - DNA, 16 bp, Artificial sequence
  Synthetic oligonucleotide
gggcaatacccaagac

SEQ ID NO: 1004 - DNA, 16 bp, Artificial sequence
  Synthetic oligonucleotide
cttcattggcagccac

SEQ ID NO: 1005 - DNA, 16 bp, Artificial sequence
  Synthetic oligonucleotide
acctaatgcaaagtcc

SEQ ID NO: 1006 - DNA, 16 bp, Artificial sequence
  Synthetic oligonucleotide
acgcagaccaccaggt

SEQ ID NO: 1007 - DNA, 16 bp, Artificial sequence
  Synthetic oligonucleotide
ccaggccgctgacttc

SEQ ID NO: 1008 - DNA, 16 bp, Artificial sequence
  Synthetic oligonucleotide
cttgtaatactggcgg

SEQ ID NO: 1009 - DNA, 16 bp, Artificial sequence
  Synthetic oligonucleotide
acacggcagagtgcag

SEQ ID NO: 1010 - DNA, 16 bp, Artificial sequence
  Synthetic oligonucleotide
accgtggcaaggccca

SEQ ID NO: 1011 - DNA, 16 bp, Artificial sequence
  Synthetic oligonucleotide
ggtggccctctgaggt

SEQ ID NO: 1012 - DNA, 16 bp, Artificial sequence
  Synthetic oligonucleotide
gctgtgtctgttagct

SEQ ID NO: 1013 - DNA, 16 bp, Artificial sequence
  Synthetic oligonucleotide
ccatgccgctgctgtt

SEQ ID NO: 1014 - DNA, 16 bp, Artificial sequence
  Synthetic oligonucleotide
tgtccgcgacaccgtg

SEQ ID NO: 1015 - DNA, 16 bp, Artificial sequence
  Synthetic oligonucleotide
agtcccgtctctcgag

SEQ ID NO: 1016 - DNA, 16 bp, Artificial sequence
  Synthetic oligonucleotide
gcggacaggccctgct

SEQ ID NO: 1017 - DNA, 16 bp, Artificial sequence
  Synthetic oligonucleotide
tgtcctcagggtacag

SEQ ID NO: 1018 - DNA, 16 bp, Artificial sequence
  Synthetic oligonucleotide
gctgtcaatgaccggg

SEQ ID NO: 1019 - DNA, 16 bp, Artificial sequence
  Synthetic oligonucleotide
agcgagtgctcctcca

SEQ ID NO: 1020 - DNA, 16 bp, Artificial sequence
  Synthetic oligonucleotide
atgtccttgagcactt

SEQ ID NO: 1021 - DNA, 16 bp, Artificial sequence
  Synthetic oligonucleotide
tgagcagcttgcaggc

SEQ ID NO: 1022 - DNA, 16 bp, Artificial sequence
  Synthetic oligonucleotide
ccggtattggtgctct

SEQ ID NO: 1023 - DNA, 16 bp, Artificial sequence
  Synthetic oligonucleotide
ctcctccgacatggcg

SEQ ID NO: 1024 - DNA, 16 bp, Artificial sequence
  Synthetic oligonucleotide
atcgccccaggtgaag

SEQ ID NO: 1025 - DNA, 16 bp, Artificial sequence
  Synthetic oligonucleotide
tcactggtcgaggcac

SEQ ID NO: 1026 - DNA, 16 bp, Artificial sequence
  Synthetic oligonucleotide
tgatgagtccacctcg

SEQ ID NO: 1027 - DNA, 16 bp, Artificial sequence
  Synthetic oligonucleotide
gtagcaactccttgag

SEQ ID NO: 1028 - DNA, 16 bp, Artificial sequence
  Synthetic oligonucleotide
tgagccacctaatgaa

SEQ ID NO: 1029 - DNA, 16 bp, Artificial sequence
  Synthetic oligonucleotide
cgggtttcaggccctg

SEQ ID NO: 1030 - DNA, 16 bp, Artificial sequence
  Synthetic oligonucleotide
cagaggacccatatcc

SEQ ID NO: 1031 - DNA, 16 bp, Artificial sequence
  Synthetic oligonucleotide
cctttgtcgagtcact

SEQ ID NO: 1032 - DNA, 16 bp, Artificial sequence
  Synthetic oligonucleotide
ccccgcaaccagtctc

SEQ ID NO: 1033 - DNA, 16 bp, Artificial sequence
  Synthetic oligonucleotide
aacttgctaccccagg

SEQ ID NO: 1034 - DNA, 16 bp, Artificial sequence
  Synthetic oligonucleotide
tgtgaagtgtcagcag

SEQ ID NO: 1035 - DNA, 16 bp, Artificial sequence
  Synthetic oligonucleotide
ggagtgggttattaag

SEQ ID NO: 1036 - DNA, 16 bp, Artificial sequence
  Synthetic oligonucleotide
aggactccaacatcac

SEQ ID NO: 1037 - DNA, 16 bp, Artificial sequence
  Synthetic oligonucleotide
tgcgccctgatcctca

SEQ ID NO: 1038 - DNA, 16 bp, Artificial sequence
  Synthetic oligonucleotide
aaatcttgatgggctg

SEQ ID NO: 1039 - DNA, 16 bp, Artificial sequence
  Synthetic oligonucleotide
gtttctgcggcccctc

SEQ ID NO: 1040 - DNA, 16 bp, Artificial sequence
  Synthetic oligonucleotide
gtgtgtccacagtggt

SEQ ID NO: 1041 - DNA, 16 bp, Artificial sequence
  Synthetic oligonucleotide
gaaggcttcactgtct

SEQ ID NO: 1042 - DNA, 16 bp, Artificial sequence
  Synthetic oligonucleotide
tttgaagtcaccaggc

SEQ ID NO: 1043 - DNA, 16 bp, Artificial sequence
  Synthetic oligonucleotide
ccttggccgatcctct

SEQ ID NO: 1044 - DNA, 16 bp, Artificial sequence
  Synthetic oligonucleotide
atgtcaccggagctct

SEQ ID NO: 1045 - DNA, 16 bp, Artificial sequence
  Synthetic oligonucleotide
ttgagggcatgagaac

SEQ ID NO: 1046 - DNA, 16 bp, Artificial sequence
  Synthetic oligonucleotide
gaaggatgagcctctc

SEQ ID NO: 1047 - DNA, 16 bp, Artificial sequence
  Synthetic oligonucleotide
agcagagtcacactaa

SEQ ID NO: 1048 - DNA, 16 bp, Artificial sequence
  Synthetic oligonucleotide
gaggtcccggtcccat

SEQ ID NO: 1049 - DNA, 16 bp, Artificial sequence
  Synthetic oligonucleotide
tatcctggtggtgcgc

SEQ ID NO: 1050 - DNA, 16 bp, Artificial sequence
  Synthetic oligonucleotide
ggttgcccctgtggct

SEQ ID NO: 1051 - DNA, 16 bp, Artificial sequence
  Synthetic oligonucleotide
ttagacttagccctga

SEQ ID NO: 1052 - DNA, 16 bp, Artificial sequence
  Synthetic oligonucleotide
atgcacatgcaacacg

SEQ ID NO: 1053 - DNA, 16 bp, Artificial sequence
  Synthetic oligonucleotide
agcaagtctggtagtt

SEQ ID NO: 1054 - DNA, 16 bp, Artificial sequence
  Synthetic oligonucleotide
tctaacggtttcaggg

SEQ ID NO: 1055 - DNA, 16 bp, Artificial sequence
  Synthetic oligonucleotide
tgctttaacaggcaat

SEQ ID NO: 1056 - DNA, 16 bp, Artificial sequence
  Synthetic oligonucleotide
gggcaactcggcttgt

SEQ ID NO: 1057 - DNA, 16 bp, Artificial sequence
  Synthetic oligonucleotide
cgctttgccatgatgc

SEQ ID NO: 1058 - DNA, 16 bp, Artificial sequence
  Synthetic oligonucleotide
cctggattttacgatc

SEQ ID NO: 1059 - DNA, 16 bp, Artificial sequence
  Synthetic oligonucleotide
caagactcggctccac

SEQ ID NO: 1060 - DNA, 16 bp, Artificial sequence
  Synthetic oligonucleotide
agccaaagtggagcgc

SEQ ID NO: 1061 - DNA, 16 bp, Artificial sequence
  Synthetic oligonucleotide
caaactagctggaccc

SEQ ID NO: 1062 - DNA, 16 bp, Artificial sequence
  Synthetic oligonucleotide
ccacagtttccgggaa

SEQ ID NO: 1063 - DNA, 16 bp, Artificial sequence
  Synthetic oligonucleotide
cccaaacctcgagttg

SEQ ID NO: 1064 - DNA, 16 bp, Artificial sequence
  Synthetic oligonucleotide
aaccagggattgacat

SEQ ID NO: 1065 - DNA, 16 bp, Artificial sequence
  Synthetic oligonucleotide
gagagaacggcactgt

SEQ ID NO: 1066 - DNA, 16 bp, Artificial sequence
  Synthetic oligonucleotide
ccctactttgctaatg

SEQ ID NO: 1067 - DNA, 16 bp, Artificial sequence
  Synthetic oligonucleotide
acgaatggagcctagg

SEQ ID NO: 1068 - DNA, 16 bp, Artificial sequence
  Synthetic oligonucleotide
tgacatttatggtgcc

SEQ ID NO: 1069 - DNA, 16 bp, Artificial sequence
  Synthetic oligonucleotide
gcagaagattaccaac

SEQ ID NO: 1070 - DNA, 16 bp, Artificial sequence
  Synthetic oligonucleotide
acctaaaacccttagc

SEQ ID NO: 1071 - DNA, 16 bp, Artificial sequence
  Synthetic oligonucleotide
caccatcctaaaggtg

SEQ ID NO: 1072 - DNA, 16 bp, Artificial sequence
  Synthetic oligonucleotide
agcgaggtgggagtgg

SEQ ID NO: 1073 - DNA, 16 bp, Artificial sequence
  Synthetic oligonucleotide
acccatcttacggaag

SEQ ID NO: 1074 - DNA, 16 bp, Artificial sequence
  Synthetic oligonucleotide
cagcaggtagggatgt

SEQ ID NO: 1075 - DNA, 16 bp, Artificial sequence
  Synthetic oligonucleotide
aggaactgcttttcgg

SEQ ID NO: 1076 - DNA, 16 bp, Artificial sequence
  Synthetic oligonucleotide
gcctgagggatgcatg

SEQ ID NO: 1077 - DNA, 16 bp, Artificial sequence
  Synthetic oligonucleotide
tcttagaaccccacca

SEQ ID NO: 1078 - DNA, 16 bp, Artificial sequence
  Synthetic oligonucleotide
gtgaagagtgcaccag

SEQ ID NO: 1079 - DNA, 16 bp, Artificial sequence
  Synthetic oligonucleotide
gtggacacggacaggg

SEQ ID NO: 1080 - DNA, 16 bp, Artificial sequence
  Synthetic oligonucleotide
ccccatgcaccgtgcc

SEQ ID NO: 1081 - DNA, 16 bp, Artificial sequence
  Synthetic oligonucleotide
ccttagtgggttccct

SEQ ID NO: 1082 - DNA, 16 bp, Artificial sequence
  Synthetic oligonucleotide
aaagacgcagaccacc

SEQ ID NO: 1083 - DNA, 16 bp, Artificial sequence
  Synthetic oligonucleotide
cttcttgtaatactgg

SEQ ID NO: 1084 - DNA, 16 bp, Artificial sequence
  Synthetic oligonucleotide
gacacggcagagtgca

SEQ ID NO: 1085 - DNA, 16 bp, Artificial sequence
  Synthetic oligonucleotide
gcaccgtggcaaggcc

SEQ ID NO: 1086 - DNA, 16 bp, Artificial sequence
  Synthetic oligonucleotide
gggtggccctctgagg

SEQ ID NO: 1087 - DNA, 16 bp, Artificial sequence
  Synthetic oligonucleotide
cggctgtgtctgttag

SEQ ID NO: 1088 - DNA, 16 bp, Artificial sequence
  Synthetic oligonucleotide
cccatgccgctgctgt

SEQ ID NO: 1089 - DNA, 16 bp, Artificial sequence
  Synthetic oligonucleotide
ctgtccgcgacaccgt

SEQ ID NO: 1090 - DNA, 16 bp, Artificial sequence
  Synthetic oligonucleotide
cagtcccgtctctcga

SEQ ID NO: 1091 - DNA, 16 bp, Artificial sequence
  Synthetic oligonucleotide
aggcggacaggccctg

SEQ ID NO: 1092 - DNA, 16 bp, Artificial sequence
  Synthetic oligonucleotide
ctgtcctcagggtaca

SEQ ID NO: 1093 - DNA, 16 bp, Artificial sequence
  Synthetic oligonucleotide
tggctgtcaatgaccg

SEQ ID NO: 1094 - DNA, 16 bp, Artificial sequence
  Synthetic oligonucleotide
tccagcgagtgctcct

SEQ ID NO: 1095 - DNA, 16 bp, Artificial sequence
  Synthetic oligonucleotide
gatgtccttgagcact

SEQ ID NO: 1096 - DNA, 16 bp, Artificial sequence
  Synthetic oligonucleotide
ttgagcagcttgcagg

SEQ ID NO: 1097 - DNA, 16 bp, Artificial sequence
  Synthetic oligonucleotide
agccggtattggtgct

SEQ ID NO: 1098 - DNA, 16 bp, Artificial sequence
  Synthetic oligonucleotide
ctgctcctccgacatg

SEQ ID NO: 1099 - DNA, 16 bp, Artificial sequence
  Synthetic oligonucleotide
tccaggccgctgactt

SEQ ID NO: 1100 - DNA, 16 bp, Artificial sequence
  Synthetic oligonucleotide
aatcgccccaggtgaa

SEQ ID NO: 1101 - DNA, 16 bp, Artificial sequence
  Synthetic oligonucleotide
ctcactggtcgaggca

SEQ ID NO: 1102 - DNA, 16 bp, Artificial sequence
  Synthetic oligonucleotide
atgatgagtccacctc

SEQ ID NO: 1103 - DNA, 16 bp, Artificial sequence
  Synthetic oligonucleotide
agtagcaactccttga

SEQ ID NO: 1104 - DNA, 16 bp, Artificial sequence
  Synthetic oligonucleotide
ttgagccacctaatga

SEQ ID NO: 1105 - DNA, 16 bp, Artificial sequence
  Synthetic oligonucleotide
gcgggtttcaggccct

SEQ ID NO: 1106 - DNA, 16 bp, Artificial sequence
  Synthetic oligonucleotide
ccagaggacccatatc

SEQ ID NO: 1107 - DNA, 16 bp, Artificial sequence
  Synthetic oligonucleotide
gcctttgtcgagtcac

SEQ ID NO: 1108 - DNA, 16 bp, Artificial sequence
  Synthetic oligonucleotide
gccccgcaaccagtct

SEQ ID NO: 1109 - DNA, 16 bp, Artificial sequence
  Synthetic oligonucleotide
caacttgctaccccag

SEQ ID NO: 1110 - DNA, 16 bp, Artificial sequence
  Synthetic oligonucleotide
cctgtgaagtgtcagc

SEQ ID NO: 1111 - DNA, 16 bp, Artificial sequence
  Synthetic oligonucleotide
aacaaggttgagatgg

SEQ ID NO: 1112 - DNA, 16 bp, Artificial sequence
  Synthetic oligonucleotide
aaggactccaacatca

SEQ ID NO: 1113 - DNA, 16 bp, Artificial sequence
  Synthetic oligonucleotide
ctgcgccctgatcctc

SEQ ID NO: 1114 - DNA, 16 bp, Artificial sequence
  Synthetic oligonucleotide
aaaatcttgatgggct

SEQ ID NO: 1115 - DNA, 16 bp, Artificial sequence
  Synthetic oligonucleotide
tgtttctgcggcccct

SEQ ID NO: 1116 - DNA, 16 bp, Artificial sequence
  Synthetic oligonucleotide
gaggtgtgtgtccaca

SEQ ID NO: 1117 - DNA, 16 bp, Artificial sequence
  Synthetic oligonucleotide
atgtgagaaggcttca

SEQ ID NO: 1118 - DNA, 16 bp, Artificial sequence
  Synthetic oligonucleotide
gggactcataaagaca

SEQ ID NO: 1119 - DNA, 16 bp, Artificial sequence
  Synthetic oligonucleotide
cccttggccgatcctc

SEQ ID NO: 1120 - DNA, 16 bp, Artificial sequence
  Synthetic oligonucleotide
gatgtcaccggagctc

SEQ ID NO: 1121 - DNA, 16 bp, Artificial sequence
  Synthetic oligonucleotide
gttgagggcatgagaa

SEQ ID NO: 1122 - DNA, 16 bp, Artificial sequence
  Synthetic oligonucleotide
ggaaggatgagcctct

SEQ ID NO: 1123 - DNA, 16 bp, Artificial sequence
  Synthetic oligonucleotide
cagcagagtcacacta

SEQ ID NO: 1124 - DNA, 16 bp, Artificial sequence
  Synthetic oligonucleotide
ggaggtcccggtccca

SEQ ID NO: 1125 - DNA, 16 bp, Artificial sequence
  Synthetic oligonucleotide
ttatcctggtggtgcg

SEQ ID NO: 1126 - DNA, 16 bp, Artificial sequence
  Synthetic oligonucleotide
gggttgcccctgtggc

SEQ ID NO: 1127 - DNA, 16 bp, Artificial sequence
  Synthetic oligonucleotide
gccttagacttagccc

SEQ ID NO: 1128 - DNA, 16 bp, Artificial sequence
  Synthetic oligonucleotide
gctgataggtgaggtg

SEQ ID NO: 1129 - DNA, 16 bp, Artificial sequence
  Synthetic oligonucleotide
caataagcaagtctgg

SEQ ID NO: 1130 - DNA, 16 bp, Artificial sequence
  Synthetic oligonucleotide
gctctaacggtttcag

SEQ ID NO: 1131 - DNA, 16 bp, Artificial sequence
  Synthetic oligonucleotide
cgtgaagcctgcttta

SEQ ID NO: 1132 - DNA, 16 bp, Artificial sequence
  Synthetic oligonucleotide
agcccagggcaactcg

SEQ ID NO: 1133 - DNA, 16 bp, Artificial sequence
  Synthetic oligonucleotide
ccccgctttgccatga

SEQ ID NO: 1134 - DNA, 16 bp, Artificial sequence
  Synthetic oligonucleotide
ctgtaggccaggtcat

SEQ ID NO: 1135 - DNA, 16 bp, Artificial sequence
  Synthetic oligonucleotide
ctcaagactcggctcc

SEQ ID NO: 1136 - DNA, 16 bp, Artificial sequence
  Synthetic oligonucleotide
agctagtgggcccagg

SEQ ID NO: 1137 - DNA, 16 bp, Artificial sequence
  Synthetic oligonucleotide
cttcaaactagctgga

SEQ ID NO: 1138 - DNA, 16 bp, Artificial sequence
  Synthetic oligonucleotide
aaccacagtttccggg

SEQ ID NO: 1139 - DNA, 16 bp, Artificial sequence
  Synthetic oligonucleotide
cctgagcgatgcctcc

SEQ ID NO: 1140 - DNA, 16 bp, Artificial sequence
  Synthetic oligonucleotide
ccagaaccagggattg

SEQ ID NO: 1141 - DNA, 16 bp, Artificial sequence
  Synthetic oligonucleotide
gaagagagaacggcac

SEQ ID NO: 1142 - DNA, 16 bp, Artificial sequence
  Synthetic oligonucleotide
ggcacaagctacctca

SEQ ID NO: 1143 - DNA, 16 bp, Artificial sequence
  Synthetic oligonucleotide
agcttgacgaatggag

SEQ ID NO: 1144 - DNA, 16 bp, Artificial sequence
  Synthetic oligonucleotide
ctctctaacagtgaca

SEQ ID NO: 1145 - DNA, 16 bp, Artificial sequence
  Synthetic oligonucleotide
atacatcaagacaggc

SEQ ID NO: 1146 - DNA, 16 bp, Artificial sequence
  Synthetic oligonucleotide
gaacacctaaaaccct

SEQ ID NO: 1147 - DNA, 16 bp, Artificial sequence
  Synthetic oligonucleotide
ggataggagtggaagt

SEQ ID NO: 1148 - DNA, 16 bp, Artificial sequence
  Synthetic oligonucleotide
aaagacagcgaggtgg

SEQ ID NO: 1149 - DNA, 16 bp, Artificial sequence
  Synthetic oligonucleotide
agcgacctcagccttg

SEQ ID NO: 1150 - DNA, 16 bp, Artificial sequence
  Synthetic oligonucleotide
gaggagtgtaagtgct

SEQ ID NO: 1151 - DNA, 16 bp, Artificial sequence
  Synthetic oligonucleotide
gcatattaggaactgc

SEQ ID NO: 1152 - DNA, 16 bp, Artificial sequence
  Synthetic oligonucleotide
gcattgggaaacttgg

SEQ ID NO: 1153 - DNA, 16 bp, Artificial sequence
  Synthetic oligonucleotide
tgacactctaccagaa

SEQ ID NO: 1154 - DNA, 16 bp, Artificial sequence
  Synthetic oligonucleotide
gtatccacggttgtcc

SEQ ID NO: 1155 - DNA, 16 bp, Artificial sequence
  Synthetic oligonucleotide
gaaacagggaagtcga

SEQ ID NO: 1156 - DNA, 16 bp, Artificial sequence
  Synthetic oligonucleotide
tctaggacaaaggtgg

SEQ ID NO: 1157 - DNA, 16 bp, Artificial sequence
  Synthetic oligonucleotide
taccttagtgggttcc

SEQ ID NO: 1158 - DNA, 16 bp, Artificial sequence
  Synthetic oligonucleotide
gagaaagacgcagacc

SEQ ID NO: 1159 - DNA, 16 bp, Artificial sequence
  Synthetic oligonucleotide
ccttcttgtaatactg

SEQ ID NO: 1160 - DNA, 16 bp, Artificial sequence
  Synthetic oligonucleotide
tggacacggcagagtg

SEQ ID NO: 1161 - DNA, 16 bp, Artificial sequence
  Synthetic oligonucleotide
tggcaccgtggcaagg

SEQ ID NO: 1162 - DNA, 16 bp, Artificial sequence
  Synthetic oligonucleotide
tggccaccctcaaggg

SEQ ID NO: 1163 - DNA, 16 bp, Artificial sequence
  Synthetic oligonucleotide
gcggctgtgtctgtta

SEQ ID NO: 1164 - DNA, 16 bp, Artificial sequence
  Synthetic oligonucleotide
tgcccatgccgctgct

SEQ ID NO: 1165 - DNA, 16 bp, Artificial sequence
  Synthetic oligonucleotide
cctgtccgcgacaccg

SEQ ID NO: 1166 - DNA, 16 bp, Artificial sequence
  Synthetic oligonucleotide
ccagtcccgtctctcg

SEQ ID NO: 1167 - DNA, 16 bp, Artificial sequence
  Synthetic oligonucleotide
aaggcggacaggccct

SEQ ID NO: 1168 - DNA, 16 bp, Artificial sequence
  Synthetic oligonucleotide
ccgactgctggcccca

SEQ ID NO: 1169 - DNA, 16 bp, Artificial sequence
  Synthetic oligonucleotide
gcttggctgtcaatga

SEQ ID NO: 1170 - DNA, 16 bp, Artificial sequence
  Synthetic oligonucleotide
cctgctccagcgagtg

SEQ ID NO: 1171 - DNA, 16 bp, Artificial sequence
  Synthetic oligonucleotide
cgatgtccttgagcac

SEQ ID NO: 1172 - DNA, 16 bp, Artificial sequence
  Synthetic oligonucleotide
gttgagcagcttgcag

SEQ ID NO: 1173 - DNA, 16 bp, Artificial sequence
  Synthetic oligonucleotide
gcagccggtattggtg

SEQ ID NO: 1174 - DNA, 16 bp, Artificial sequence
  Synthetic oligonucleotide
actgctcctccgacat

SEQ ID NO: 1175 - DNA, 16 bp, Artificial sequence
  Synthetic oligonucleotide
catccaggccgctgac

SEQ ID NO: 1176 - DNA, 16 bp, Artificial sequence
  Synthetic oligonucleotide
tgaatcgccccaggtg

SEQ ID NO: 1177 - DNA, 16 bp, Artificial sequence
  Synthetic oligonucleotide
tcctcactggtcgagg

SEQ ID NO: 1178 - DNA, 16 bp, Artificial sequence
  Synthetic oligonucleotide
catgatgagtccacct

SEQ ID NO: 1179 - DNA, 16 bp, Artificial sequence
  Synthetic oligonucleotide
tgagtagcaactcctt

SEQ ID NO: 1180 - DNA, 16 bp, Artificial sequence
  Synthetic oligonucleotide
tgttgagccacctaat

SEQ ID NO: 1181 - DNA, 16 bp, Artificial sequence
  Synthetic oligonucleotide
cccgttttcccccatc

SEQ ID NO: 1182 - DNA, 16 bp, Artificial sequence
  Synthetic oligonucleotide
tcccgaaggccccaga

SEQ ID NO: 1183 - DNA, 16 bp, Artificial sequence
  Synthetic oligonucleotide
tggcctttgtcgagtc

SEQ ID NO: 1184 - DNA, 16 bp, Artificial sequence
  Synthetic oligonucleotide
tcactggtcgaggctg

SEQ ID NO: 1185 - DNA, 16 bp, Artificial sequence
  Synthetic oligonucleotide
tgccccgcaaccagtc

SEQ ID NO: 1186 - DNA, 16 bp, Artificial sequence
  Synthetic oligonucleotide
gcaacttgctacccca

SEQ ID NO: 1187 - DNA, 16 bp, Artificial sequence
  Synthetic oligonucleotide
acctgtgaagtgtcag

SEQ ID NO: 1188 - DNA, 16 bp, Artificial sequence
  Synthetic oligonucleotide
ttcaaacaaggttgag

SEQ ID NO: 1189 - DNA, 16 bp, Artificial sequence
  Synthetic oligonucleotide
tgaaggactccaacat

SEQ ID NO: 1190 - DNA, 16 bp, Artificial sequence
  Synthetic oligonucleotide
cctgcgccctgatcct

SEQ ID NO: 1191 - DNA, 16 bp, Artificial sequence
  Synthetic oligonucleotide
taaaatcttgatgggc

SEQ ID NO: 1192 - DNA, 16 bp, Artificial sequence
  Synthetic oligonucleotide
gtgtttctgcggcccc

SEQ ID NO: 1193 - DNA, 16 bp, Artificial sequence
  Synthetic oligonucleotide
agaggtgtgtgtccac

SEQ ID NO: 1194 - DNA, 16 bp, Artificial sequence
  Synthetic oligonucleotide
gatgtgagaaggcttc

SEQ ID NO: 1195 - DNA, 16 bp, Artificial sequence
  Synthetic oligonucleotide
agggactcataaagac

SEQ ID NO: 1196 - DNA, 16 bp, Artificial sequence
  Synthetic oligonucleotide
ccccttggccgatcct

SEQ ID NO: 1197 - DNA, 16 bp, Artificial sequence
  Synthetic oligonucleotide
ggatgtcaccggagct

SEQ ID NO: 1198 - DNA, 16 bp, Artificial sequence
  Synthetic oligonucleotide
cgttgagggcatgaga

SEQ ID NO: 1199 - DNA, 16 bp, Artificial sequence
  Synthetic oligonucleotide
aggaaggatgagcctc

SEQ ID NO: 1200 - DNA, 16 bp, Artificial sequence
  Synthetic oligonucleotide
ccgacccccagcagag

SEQ ID NO: 1201 - DNA, 16 bp, Artificial sequence
  Synthetic oligonucleotide
gggaggtcccggtccc

SEQ ID NO: 1202 - DNA, 16 bp, Artificial sequence
  Synthetic oligonucleotide
tttatcctggtggtgc

SEQ ID NO: 1203 - DNA, 16 bp, Artificial sequence
  Synthetic oligonucleotide
cccgaactggacccgg

SEQ ID NO: 1204 - DNA, 16 bp, Artificial sequence
  Synthetic oligonucleotide
acacaggctacgcggg

SEQ ID NO: 1205 - DNA, 16 bp, Artificial sequence
  Synthetic oligonucleotide
tcgaattcagagggtc

SEQ ID NO: 1206 - DNA, 16 bp, Artificial sequence
  Synthetic oligonucleotide
ggctgcaacaagtcat

SEQ ID NO: 1207 - DNA, 16 bp, Artificial sequence
  Synthetic oligonucleotide
tggcaaatccaactcc

SEQ ID NO: 1208 - DNA, 16 bp, Artificial sequence
  Synthetic oligonucleotide
agcttggcattaaatg

SEQ ID NO: 1209 - DNA, 16 bp, Artificial sequence
  Synthetic oligonucleotide
gcacatccccgctttg

SEQ ID NO: 1210 - DNA, 16 bp, Artificial sequence
  Synthetic oligonucleotide
tccataggagagaccc

SEQ ID NO: 1211 - DNA, 16 bp, Artificial sequence
  Synthetic oligonucleotide
aactcaagactcggct

SEQ ID NO: 1212 - DNA, 16 bp, Artificial sequence
  Synthetic oligonucleotide
agccagctagtgggcc

SEQ ID NO: 1213 - DNA, 16 bp, Artificial sequence
  Synthetic oligonucleotide
ccgcagtagcatgtct

SEQ ID NO: 1214 - DNA, 16 bp, Artificial sequence
  Synthetic oligonucleotide
ccgaaccacagtttcc

SEQ ID NO: 1215 - DNA, 16 bp, Artificial sequence
  Synthetic oligonucleotide
ccacgggctgccgtct

SEQ ID NO: 1216 - DNA, 16 bp, Artificial sequence
  Synthetic oligonucleotide
gaccagaaccagggat

SEQ ID NO: 1217 - DNA, 16 bp, Artificial sequence
  Synthetic oligonucleotide
aagaagagagaacggc

SEQ ID NO: 1218 - DNA, 16 bp, Artificial sequence
  Synthetic oligonucleotide
agcacaggccttactc

SEQ ID NO: 1219 - DNA, 16 bp, Artificial sequence
  Synthetic oligonucleotide
gcatagcttgacgaat

SEQ ID NO: 1220 - DNA, 16 bp, Artificial sequence
  Synthetic oligonucleotide
ttaaaggtaactggcc

SEQ ID NO: 1221 - DNA, 16 bp, Artificial sequence
  Synthetic oligonucleotide
gaatacatcaagacag

SEQ ID NO: 1222 - DNA, 16 bp, Artificial sequence
  Synthetic oligonucleotide
gggaacacctaaaacc

SEQ ID NO: 1223 - DNA, 16 bp, Artificial sequence
  Synthetic oligonucleotide
caaggataggagtgga

SEQ ID NO: 1224 - DNA, 16 bp, Artificial sequence
  Synthetic oligonucleotide
ggaaagacagcgaggt

SEQ ID NO: 1225 - DNA, 16 bp, Artificial sequence
  Synthetic oligonucleotide
ccaaagctgcccgagg

SEQ ID NO: 1226 - DNA, 16 bp, Artificial sequence
  Synthetic oligonucleotide
gtccgaggagtgtaag

SEQ ID NO: 1227 - DNA, 16 bp, Artificial sequence
  Synthetic oligonucleotide
gccctacgaacacagg

SEQ ID NO: 1228 - DNA, 16 bp, Artificial sequence
  Synthetic oligonucleotide
cctggagtcggcctgg

SEQ ID NO: 1229 - DNA, 16 bp, Artificial sequence
  Synthetic oligonucleotide
ttcgagggagcctcag

SEQ ID NO: 1230 - DNA, 16 bp, Artificial sequence
  Synthetic oligonucleotide
tcctagtatccacggt

SEQ ID NO: 1231 - DNA, 16 bp, Artificial sequence
  Synthetic oligonucleotide
tgacacgcagccatta

SEQ ID NO: 1232 - DNA, 16 bp, Artificial sequence
  Synthetic oligonucleotide
atatttggcatctagg

SEQ ID NO: 1233 - DNA, 16 bp, Artificial sequence
  Synthetic oligonucleotide
gtacaggtgagcctgt

SEQ ID NO: 1234 - DNA, 16 bp, Artificial sequence
  Synthetic oligonucleotide
gtatgagtgaggtggc

SEQ ID NO: 1235 - DNA, 16 bp, Artificial sequence
  Synthetic oligonucleotide
ttcatccaggccgctg

SEQ ID NO: 1236 - DNA, 16 bp, Artificial sequence
  Synthetic oligonucleotide
cccttcttgtaatact

SEQ ID NO: 1237 - DNA, 16 bp, Artificial sequence
  Synthetic oligonucleotide
tgtggacacggcagag

SEQ ID NO: 1238 - DNA, 16 bp, Artificial sequence
  Synthetic oligonucleotide
ctggcaccgtggcaag

SEQ ID NO: 1239 - DNA, 16 bp, Artificial sequence
  Synthetic oligonucleotide
ctggccaccctcaagg

SEQ ID NO: 1240 - DNA, 16 bp, Artificial sequence
  Synthetic oligonucleotide
tggcggctgtgtctgt

SEQ ID NO: 1241 - DNA, 16 bp, Artificial sequence
  Synthetic oligonucleotide
ctgcccatgccgctgc

SEQ ID NO: 1242 - DNA, 16 bp, Artificial sequence
  Synthetic oligonucleotide
agcctgtccgcgacac

SEQ ID NO: 1243 - DNA, 16 bp, Artificial sequence
  Synthetic oligonucleotide
tccagtcccgtctctc

SEQ ID NO: 1244 - DNA, 16 bp, Artificial sequence
  Synthetic oligonucleotide
agaaggcggacaggcc

SEQ ID NO: 1245 - DNA, 16 bp, Artificial sequence
  Synthetic oligonucleotide
tcccgactgctggccc

SEQ ID NO: 1246 - DNA, 16 bp, Artificial sequence
  Synthetic oligonucleotide
gggcttggctgtcaat

SEQ ID NO: 1247 - DNA, 16 bp, Artificial sequence
  Synthetic oligonucleotide
cacctgctccagcgag

SEQ ID NO: 1248 - DNA, 16 bp, Artificial sequence
  Synthetic oligonucleotide
tcgatgtccttgagca

SEQ ID NO: 1249 - DNA, 16 bp, Artificial sequence
  Synthetic oligonucleotide
ctgcggtgatgttgag

SEQ ID NO: 1250 - DNA, 16 bp, Artificial sequence
  Synthetic oligonucleotide
ggcagccggtattggt

SEQ ID NO: 1251 - DNA, 16 bp, Artificial sequence
  Synthetic oligonucleotide
gaactgctcctccgac

SEQ ID NO: 1252 - DNA, 16 bp, Artificial sequence
  Synthetic oligonucleotide
agtgaatcgccccagg

SEQ ID NO: 1253 - DNA, 16 bp, Artificial sequence
  Synthetic oligonucleotide
ctcctcactggtcgag

SEQ ID NO: 1254 - DNA, 16 bp, Artificial sequence
  Synthetic oligonucleotide
agcatgatgagtccac

SEQ ID NO: 1255 - DNA, 16 bp, Artificial sequence
  Synthetic oligonucleotide
ttgagtagcaactcct

SEQ ID NO: 1256 - DNA, 16 bp, Artificial sequence
  Synthetic oligonucleotide
ttgttgagccacctaa

SEQ ID NO: 1257 - DNA, 16 bp, Artificial sequence
  Synthetic oligonucleotide
gcccgttttcccccat

SEQ ID NO: 1258 - DNA, 16 bp, Artificial sequence
  Synthetic oligonucleotide
gtcccgaaggccccag

SEQ ID NO: 1259 - DNA, 16 bp, Artificial sequence
  Synthetic oligonucleotide
tgtggcctttgtcgag

SEQ ID NO: 1260 - DNA, 16 bp, Artificial sequence
  Synthetic oligonucleotide
gtctttatcctggtgg

SEQ ID NO: 1261 - DNA, 16 bp, Artificial sequence
  Synthetic oligonucleotide
ttgccccgcaaccagt

SEQ ID NO: 1262 - DNA, 16 bp, Artificial sequence
  Synthetic oligonucleotide
agcaacttgctacccc

SEQ ID NO: 1263 - DNA, 16 bp, Artificial sequence
  Synthetic oligonucleotide
cacctgtgaagtgtca

SEQ ID NO: 1264 - DNA, 16 bp, Artificial sequence
  Synthetic oligonucleotide
cttcaaacaaggttga

SEQ ID NO: 1265 - DNA, 16 bp, Artificial sequence
  Synthetic oligonucleotide
gtgaaggactccaaca

SEQ ID NO: 1266 - DNA, 16 bp, Artificial sequence
  Synthetic oligonucleotide
tcctgcgccctgatcc

SEQ ID NO: 1267 - DNA, 16 bp, Artificial sequence
  Synthetic oligonucleotide
tggtctgtaaaatctt

SEQ ID NO: 1268 - DNA, 16 bp, Artificial sequence
  Synthetic oligonucleotide
cgtgtttctgcggccc

SEQ ID NO: 1269 - DNA, 16 bp, Artificial sequence
  Synthetic oligonucleotide
gagaggtgtgtgtcca

SEQ ID NO: 1270 - DNA, 16 bp, Artificial sequence
  Synthetic oligonucleotide
cgatgtgagaaggctt

SEQ ID NO: 1271 - DNA, 16 bp, Artificial sequence
  Synthetic oligonucleotide
cagggactcataaaga

SEQ ID NO: 1272 - DNA, 16 bp, Artificial sequence
  Synthetic oligonucleotide
ggccccttggccgatc

SEQ ID NO: 1273 - DNA, 16 bp, Artificial sequence
  Synthetic oligonucleotide
cggatgtcaccggagc

SEQ ID NO: 1274 - DNA, 16 bp, Artificial sequence
  Synthetic oligonucleotide
gggtctcttgctcccc

SEQ ID NO: 1275 - DNA, 16 bp, Artificial sequence
  Synthetic oligonucleotide
gaggaaggatgagcct

SEQ ID NO: 1276 - DNA, 16 bp, Artificial sequence
  Synthetic oligonucleotide
tccgacccccagcaga

SEQ ID NO: 1277 - DNA, 16 bp, Artificial sequence
  Synthetic oligonucleotide
ccgtcataatcctggg

SEQ ID NO: 1278 - DNA, 16 bp, Artificial sequence
  Synthetic oligonucleotide
ctttatcctggtggtg

SEQ ID NO: 1279 - DNA, 16 bp, Artificial sequence
  Synthetic oligonucleotide
gctcagcggtgacccc

SEQ ID NO: 1280 - DNA, 16 bp, Artificial sequence
  Synthetic oligonucleotide
ccatcataaaggacac

SEQ ID NO: 1281 - DNA, 16 bp, Artificial sequence
  Synthetic oligonucleotide
ccctatcgaattcaga

SEQ ID NO: 1282 - DNA, 16 bp, Artificial sequence
  Synthetic oligonucleotide
gttatactcaggctgc

SEQ ID NO: 1283 - DNA, 16 bp, Artificial sequence
  Synthetic oligonucleotide
caggagaccggctggc

SEQ ID NO: 1284 - DNA, 16 bp, Artificial sequence
  Synthetic oligonucleotide
gggagagcagaatctg

SEQ ID NO: 1285 - DNA, 16 bp, Artificial sequence
  Synthetic oligonucleotide
ctgcacatccccgctt

SEQ ID NO: 1286 - DNA, 16 bp, Artificial sequence
  Synthetic oligonucleotide
acgaagacctccactt

SEQ ID NO: 1287 - DNA, 16 bp, Artificial sequence
  Synthetic oligonucleotide
ctcgaactcaagactc

SEQ ID NO: 1288 - DNA, 16 bp, Artificial sequence
  Synthetic oligonucleotide
gtccaggccaactgtc

SEQ ID NO: 1289 - DNA, 16 bp, Artificial sequence
  Synthetic oligonucleotide
agccgcagtagcatgt

SEQ ID NO: 1290 - DNA, 16 bp, Artificial sequence
  Synthetic oligonucleotide
ctgacagctcccgaac

SEQ ID NO: 1291 - DNA, 16 bp, Artificial sequence
  Synthetic oligonucleotide
tgccagtcccacgggc

SEQ ID NO: 1292 - DNA, 16 bp, Artificial sequence
  Synthetic oligonucleotide
gtccggaccagaacca

SEQ ID NO: 1293 - DNA, 16 bp, Artificial sequence
  Synthetic oligonucleotide
gcccaacctgcaacta

SEQ ID NO: 1294 - DNA, 16 bp, Artificial sequence
  Synthetic oligonucleotide
tgacacatccttgaca

SEQ ID NO: 1295 - DNA, 16 bp, Artificial sequence
  Synthetic oligonucleotide
tagcatagcttgacga

SEQ ID NO: 1296 - DNA, 16 bp, Artificial sequence
  Synthetic oligonucleotide
gctttaaaggtaactg

SEQ ID NO: 1297 - DNA, 16 bp, Artificial sequence
  Synthetic oligonucleotide
tgagacttaagaatac

SEQ ID NO: 1298 - DNA, 16 bp, Artificial sequence
  Synthetic oligonucleotide
ccggaggcagtgccac

SEQ ID NO: 1299 - DNA, 16 bp, Artificial sequence
  Synthetic oligonucleotide
tgacaaggataggagt

SEQ ID NO: 1300 - DNA, 16 bp, Artificial sequence
  Synthetic oligonucleotide
agacaggccttctggc

SEQ ID NO: 1301 - DNA, 16 bp, Artificial sequence
  Synthetic oligonucleotide
gtgtagaagtgccagc

SEQ ID NO: 1302 - DNA, 16 bp, Artificial sequence
  Synthetic oligonucleotide
cagatatggtgcggca

SEQ ID NO: 1303 - DNA, 16 bp, Artificial sequence
  Synthetic oligonucleotide
tgtcagccctacgaac

SEQ ID NO: 1304 - DNA, 16 bp, Artificial sequence
  Synthetic oligonucleotide
cacttaataagcccat

SEQ ID NO: 1305 - DNA, 16 bp, Artificial sequence
  Synthetic oligonucleotide
acctttcgagggagcc

SEQ ID NO: 1306 - DNA, 16 bp, Artificial sequence
  Synthetic oligonucleotide
tggtacactacttttc

SEQ ID NO: 1307 - DNA, 16 bp, Artificial sequence
  Synthetic oligonucleotide
atttagacactcaggg

SEQ ID NO: 1308 - DNA, 16 bp, Artificial sequence
  Synthetic oligonucleotide
acacagattgcacaca

SEQ ID NO: 1309 - DNA, 16 bp, Artificial sequence
  Synthetic oligonucleotide
cggtacaggtgagcct

SEQ ID NO: 1310 - DNA, 16 bp, Artificial sequence
  Synthetic oligonucleotide
agccagtggtatgagt

SEQ ID NO: 1311 - DNA, 16 bp, Artificial sequence
  Synthetic oligonucleotide
gtgtggacacggcaga

SEQ ID NO: 1312 - DNA, 16 bp, Artificial sequence
  Synthetic oligonucleotide
gctggcaccgtggcaa

SEQ ID NO: 1313 - DNA, 16 bp, Artificial sequence
  Synthetic oligonucleotide
cactcaggttggccac

SEQ ID NO: 1314 - DNA, 16 bp, Artificial sequence
  Synthetic oligonucleotide
ctggcggctgtgtctg

SEQ ID NO: 1315 - DNA, 16 bp, Artificial sequence
  Synthetic oligonucleotide
agacccgggctggcgc

SEQ ID NO: 1316 - DNA, 16 bp, Artificial sequence
  Synthetic oligonucleotide
caagcctgtccgcgac

SEQ ID NO: 1317 - DNA, 16 bp, Artificial sequence
  Synthetic oligonucleotide
actccagtcccgtctc

SEQ ID NO: 1318 - DNA, 16 bp, Artificial sequence
  Synthetic oligonucleotide
gtagaaggcggacagg

SEQ ID NO: 1319 - DNA, 16 bp, Artificial sequence
  Synthetic oligonucleotide
cctcccgactgctggc

SEQ ID NO: 1320 - DNA, 16 bp, Artificial sequence
  Synthetic oligonucleotide
cgccgggcaccaagtc

SEQ ID NO: 1321 - DNA, 16 bp, Artificial sequence
  Synthetic oligonucleotide
atggactgcacctgct

SEQ ID NO: 1322 - DNA, 16 bp, Artificial sequence
  Synthetic oligonucleotide
tctcgatgtccttgag

SEQ ID NO: 1323 - DNA, 16 bp, Artificial sequence
  Synthetic oligonucleotide
tctgcggtgatgttga

SEQ ID NO: 1324 - DNA, 16 bp, Artificial sequence
  Synthetic oligonucleotide
aggccttgcccatggg

SEQ ID NO: 1325 - DNA, 16 bp, Artificial sequence
  Synthetic oligonucleotide
ggaactgctcctccga

SEQ ID NO: 1326 - DNA, 16 bp, Artificial sequence
  Synthetic oligonucleotide
tttcatccaggccgct

SEQ ID NO: 1327 - DNA, 16 bp, Artificial sequence
  Synthetic oligonucleotide
tagtgaatcgccccag

SEQ ID NO: 1328 - DNA, 16 bp, Artificial sequence
  Synthetic oligonucleotide
tctcctcactggtcga

SEQ ID NO: 1329 - DNA, 16 bp, Artificial sequence
  Synthetic oligonucleotide
gagcatgatgagtcca

SEQ ID NO: 1330 - DNA, 16 bp, Artificial sequence
  Synthetic oligonucleotide
gcttgagtagcaactc

SEQ ID NO: 1331 - DNA, 16 bp, Artificial sequence
  Synthetic oligonucleotide
cttgttgagccaccta

SEQ ID NO: 1332 - DNA, 16 bp, Artificial sequence
  Synthetic oligonucleotide
tggcttccggatgatg

SEQ ID NO: 1333 - DNA, 16 bp, Artificial sequence
  Synthetic oligonucleotide
ctgcccgttttccccc

SEQ ID NO: 1334 - DNA, 16 bp, Artificial sequence
  Synthetic oligonucleotide
ggtcccgaaggcccca

SEQ ID NO: 1335 - DNA, 16 bp, Artificial sequence
  Synthetic oligonucleotide
ctgtggcctttgtcga

SEQ ID NO: 1336 - DNA, 16 bp, Artificial sequence
  Synthetic oligonucleotide
gggtctttatcctggt

SEQ ID NO: 1337 - DNA, 16 bp, Artificial sequence
  Synthetic oligonucleotide
cttgccccgcaaccag

SEQ ID NO: 1338 - DNA, 16 bp, Artificial sequence
  Synthetic oligonucleotide
aagcaacttgctaccc

SEQ ID NO: 1339 - DNA, 16 bp, Artificial sequence
  Synthetic oligonucleotide
accggttcccacctgt

SEQ ID NO: 1340 - DNA, 16 bp, Artificial sequence
  Synthetic oligonucleotide
gcttcaaacaaggttg

SEQ ID NO: 1341 - DNA, 16 bp, Artificial sequence
  Synthetic oligonucleotide
agtgaaggactccaac

SEQ ID NO: 1342 - DNA, 16 bp, Artificial sequence
  Synthetic oligonucleotide
ttcctgcgccctgatc

SEQ ID NO: 1343 - DNA, 16 bp, Artificial sequence
  Synthetic oligonucleotide
gttgttggtctgtaaa

SEQ ID NO: 1344 - DNA, 16 bp, Artificial sequence
  Synthetic oligonucleotide
ccgtgtttctgcggcc

SEQ ID NO: 1345 - DNA, 16 bp, Artificial sequence
  Synthetic oligonucleotide
cgagaggtgtgtgtcc

SEQ ID NO: 1346 - DNA, 16 bp, Artificial sequence
  Synthetic oligonucleotide
gcgatgtgagaaggct

SEQ ID NO: 1347 - DNA, 16 bp, Artificial sequence
  Synthetic oligonucleotide
acagggactcataaag

SEQ ID NO: 1348 - DNA, 16 bp, Artificial sequence
  Synthetic oligonucleotide
aggccccttggccgat

SEQ ID NO: 1349 - DNA, 16 bp, Artificial sequence
  Synthetic oligonucleotide
acggatgtcaccggag

SEQ ID NO: 1350 - DNA, 16 bp, Artificial sequence
  Synthetic oligonucleotide
tgggtctcttgctccc

SEQ ID NO: 1351 - DNA, 16 bp, Artificial sequence
  Synthetic oligonucleotide
ctaaggtccctggctg

SEQ ID NO: 1352 - DNA, 16 bp, Artificial sequence
  Synthetic oligonucleotide
atccgacccccagcag

SEQ ID NO: 1353 - DNA, 16 bp, Artificial sequence
  Synthetic oligonucleotide
gccgtcataatcctgg

SEQ ID NO: 1354 - DNA, 16 bp, Artificial sequence
  Synthetic oligonucleotide
tctttatcctggtggt

SEQ ID NO: 1355 - DNA, 16 bp, Artificial sequence
  Synthetic oligonucleotide
cttcgaggtactgcta

SEQ ID NO: 1356 - DNA, 16 bp, Artificial sequence
  Synthetic oligonucleotide
gcccatggccatcata

SEQ ID NO: 1357 - DNA, 16 bp, Artificial sequence
  Synthetic oligonucleotide
agagaagccctatcga

SEQ ID NO: 1358 - DNA, 16 bp, Artificial sequence
  Synthetic oligonucleotide
gggttatactcaggct

SEQ ID NO: 1359 - DNA, 16 bp, Artificial sequence
  Synthetic oligonucleotide
gcccaggagaccggct

SEQ ID NO: 1360 - DNA, 16 bp, Artificial sequence
  Synthetic oligonucleotide
cgccgtacctcccagc

SEQ ID NO: 1361 - DNA, 16 bp, Artificial sequence
  Synthetic oligonucleotide
gaaattgccattcacg

SEQ ID NO: 1362 - DNA, 16 bp, Artificial sequence
  Synthetic oligonucleotide
gaacgaagacctccac

SEQ ID NO: 1363 - DNA, 16 bp, Artificial sequence
  Synthetic oligonucleotide
acttgacggacaaggg

SEQ ID NO: 1364 - DNA, 16 bp, Artificial sequence
  Synthetic oligonucleotide
gacgaggtgggtttct

SEQ ID NO: 1365 - DNA, 16 bp, Artificial sequence
  Synthetic oligonucleotide
aaaagctgggctaccc

SEQ ID NO: 1366 - DNA, 16 bp, Artificial sequence
  Synthetic oligonucleotide
agcaaaagatgccctc

SEQ ID NO: 1367 - DNA, 16 bp, Artificial sequence
  Synthetic oligonucleotide
tgccatgtccagggtc

SEQ ID NO: 1368 - DNA, 16 bp, Artificial sequence
  Synthetic oligonucleotide
ttattagcagcagggt

SEQ ID NO: 1369 - DNA, 16 bp, Artificial sequence
  Synthetic oligonucleotide
ggcttactggtcaggc

SEQ ID NO: 1370 - DNA, 16 bp, Artificial sequence
  Synthetic oligonucleotide
ataatgacacatcctt

SEQ ID NO: 1371 - DNA, 16 bp, Artificial sequence
  Synthetic oligonucleotide
ggatagcatagcttga

SEQ ID NO: 1372 - DNA, 16 bp, Artificial sequence
  Synthetic oligonucleotide
ccgcagtctggtttaa

SEQ ID NO: 1373 - DNA, 16 bp, Artificial sequence
  Synthetic oligonucleotide
acattctgggatggca

SEQ ID NO: 1374 - DNA, 16 bp, Artificial sequence
  Synthetic oligonucleotide
acccggaggcagtgcc

SEQ ID NO: 1375 - DNA, 16 bp, Artificial sequence
  Synthetic oligonucleotide
tttgacaaggatagga

SEQ ID NO: 1376 - DNA, 16 bp, Artificial sequence
  Synthetic oligonucleotide
cgacatggttgggcag

SEQ ID NO: 1377 - DNA, 16 bp, Artificial sequence
  Synthetic oligonucleotide
cactagaggtggacag

SEQ ID NO: 1378 - DNA, 16 bp, Artificial sequence
  Synthetic oligonucleotide
tcaacagatatggtgc

SEQ ID NO: 1379 - DNA, 16 bp, Artificial sequence
  Synthetic oligonucleotide
cactatcatgtcagcc

SEQ ID NO: 1380 - DNA, 16 bp, Artificial sequence
  Synthetic oligonucleotide
ccccacttaataagcc

SEQ ID NO: 1381 - DNA, 16 bp, Artificial sequence
  Synthetic oligonucleotide
aaaggacctttcgagg

SEQ ID NO: 1382 - DNA, 16 bp, Artificial sequence
  Synthetic oligonucleotide
gttcatggtacactac

SEQ ID NO: 1383 - DNA, 16 bp, Artificial sequence
  Synthetic oligonucleotide
gacaatttagacactc

SEQ ID NO: 1384 - DNA, 16 bp, Artificial sequence
  Synthetic oligonucleotide
ggacacagattgcaca

SEQ ID NO: 1385 - DNA, 16 bp, Artificial sequence
  Synthetic oligonucleotide
tcccggtacaggtgag

SEQ ID NO: 1386 - DNA, 16 bp, Artificial sequence
  Synthetic oligonucleotide
caggagggccccgaga

SEQ ID NO: 1387 - DNA, 16 bp, Artificial sequence
  Synthetic oligonucleotide
agtgtggacacggcag

SEQ ID NO: 1388 - DNA, 16 bp, Artificial sequence
  Synthetic oligonucleotide
ctgctggcaccgtggc

SEQ ID NO: 1389 - DNA, 16 bp, Artificial sequence
  Synthetic oligonucleotide
agcactcaggttggcc

SEQ ID NO: 1390 - DNA, 16 bp, Artificial sequence
  Synthetic oligonucleotide
gctggcggctgtgtct

SEQ ID NO: 1391 - DNA, 16 bp, Artificial sequence
  Synthetic oligonucleotide
tcagacccgggctggc

SEQ ID NO: 1392 - DNA, 16 bp, Artificial sequence
  Synthetic oligonucleotide
ccaagcctgtccgcga

SEQ ID NO: 1393 - DNA, 16 bp, Artificial sequence
  Synthetic oligonucleotide
ggactccagtcccgtc

SEQ ID NO: 1394 - DNA, 16 bp, Artificial sequence
  Synthetic oligonucleotide
ggtagaaggcggacag

SEQ ID NO: 1395 - DNA, 16 bp, Artificial sequence
  Synthetic oligonucleotide
tcctcccgactgctgg

SEQ ID NO: 1396 - DNA, 16 bp, Artificial sequence
  Synthetic oligonucleotide
cccgccgggcaccaag

SEQ ID NO: 1397 - DNA, 16 bp, Artificial sequence
  Synthetic oligonucleotide
catggactgcacctgc

SEQ ID NO: 1398 - DNA, 16 bp, Artificial sequence
  Synthetic oligonucleotide
gtctcgatgtccttga

SEQ ID NO: 1399 - DNA, 16 bp, Artificial sequence
  Synthetic oligonucleotide
gatctgcggtgatgtt

SEQ ID NO: 1400 - DNA, 16 bp, Artificial sequence
  Synthetic oligonucleotide
tccttgcccgccagct

SEQ ID NO: 1401 - DNA, 16 bp, Artificial sequence
  Synthetic oligonucleotide
cggaactgctcctccg

SEQ ID NO: 1402 - DNA, 16 bp, Artificial sequence
  Synthetic oligonucleotide
ctttcatccaggccgc

SEQ ID NO: 1403 - DNA, 16 bp, Artificial sequence
  Synthetic oligonucleotide
gtagtgaatcgcccca

SEQ ID NO: 1404 - DNA, 16 bp, Artificial sequence
  Synthetic oligonucleotide
tcggtccagctctcct

SEQ ID NO: 1405 - DNA, 16 bp, Artificial sequence
  Synthetic oligonucleotide
cggagcatgatgagtc

SEQ ID NO: 1406 - DNA, 16 bp, Artificial sequence
  Synthetic oligonucleotide
gggcttgagtagcaac

SEQ ID NO: 1407 - DNA, 16 bp, Artificial sequence
  Synthetic oligonucleotide
tccttgttgagccacc

SEQ ID NO: 1408 - DNA, 16 bp, Artificial sequence
  Synthetic oligonucleotide
tctggcttccggatga

SEQ ID NO: 1409 - DNA, 16 bp, Artificial sequence
  Synthetic oligonucleotide
gactgcccgttttccc

SEQ ID NO: 1410 - DNA, 16 bp, Artificial sequence
  Synthetic oligonucleotide
agggtcccgaaggccc

SEQ ID NO: 1411 - DNA, 16 bp, Artificial sequence
  Synthetic oligonucleotide
ggactgcctgtggcct

SEQ ID NO: 1412 - DNA, 16 bp, Artificial sequence
  Synthetic oligonucleotide
gtgccagagctagagg

SEQ ID NO: 1413 - DNA, 16 bp, Artificial sequence
  Synthetic oligonucleotide
ccttgccccgcaacca

SEQ ID NO: 1414 - DNA, 16 bp, Artificial sequence
  Synthetic oligonucleotide
aaagcaacttgctacc

SEQ ID NO: 1415 - DNA, 16 bp, Artificial sequence
  Synthetic oligonucleotide
gaccggttcccacctg

SEQ ID NO: 1416 - DNA, 16 bp, Artificial sequence
  Synthetic oligonucleotide
tgcttcaaacaaggtt

SEQ ID NO: 1417 - DNA, 16 bp, Artificial sequence
  Synthetic oligonucleotide
aagtgaaggactccaa

SEQ ID NO: 1418 - DNA, 16 bp, Artificial sequence
  Synthetic oligonucleotide
attcctgcgccctgat

SEQ ID NO: 1419 - DNA, 16 bp, Artificial sequence
  Synthetic oligonucleotide
ggttgttggtctgtaa

SEQ ID NO: 1420 - DNA, 16 bp, Artificial sequence
  Synthetic oligonucleotide
gccgtgtttctgcggc

SEQ ID NO: 1421 - DNA, 16 bp, Artificial sequence
  Synthetic oligonucleotide
ccgagaggtgtgtgtc

SEQ ID NO: 1422 - DNA, 16 bp, Artificial sequence
  Synthetic oligonucleotide
agcgatgtgagaaggc

SEQ ID NO: 1423 - DNA, 16 bp, Artificial sequence
  Synthetic oligonucleotide
aacagggactcataaa

SEQ ID NO: 1424 - DNA, 16 bp, Artificial sequence
  Synthetic oligonucleotide
gaggccccttggccga

SEQ ID NO: 1425 - DNA, 16 bp, Artificial sequence
  Synthetic oligonucleotide
cacggatgtcaccgga

SEQ ID NO: 1426 - DNA, 16 bp, Artificial sequence
  Synthetic oligonucleotide
gtgaggtttcctgggt

SEQ ID NO: 1427 - DNA, 16 bp, Artificial sequence
  Synthetic oligonucleotide
actaaggtccctggct

SEQ ID NO: 1428 - DNA, 16 bp, Artificial sequence
  Synthetic oligonucleotide
catccgacccccagca

SEQ ID NO: 1429 - DNA, 16 bp, Artificial sequence
  Synthetic oligonucleotide
cgccgtcataatcctg

SEQ ID NO: 1430 - DNA, 16 bp, Artificial sequence
  Synthetic oligonucleotide
ttacaagaagctgctt

SEQ ID NO: 1431 - DNA, 16 bp, Artificial sequence
  Synthetic oligonucleotide
gaaatgagcaccttcg

SEQ ID NO: 1432 - DNA, 16 bp, Artificial sequence
  Synthetic oligonucleotide
atgcagctttattggg

SEQ ID NO: 1433 - DNA, 16 bp, Artificial sequence
  Synthetic oligonucleotide
tcagacttggttgaca

SEQ ID NO: 1434 - DNA, 16 bp, Artificial sequence
  Synthetic oligonucleotide
ccccgggttatactca

SEQ ID NO: 1435 - DNA, 16 bp, Artificial sequence
  Synthetic oligonucleotide
aagaagcggaaggtga

SEQ ID NO: 1436 - DNA, 16 bp, Artificial sequence
  Synthetic oligonucleotide
gcatacgccgtacctc

SEQ ID NO: 1437 - DNA, 16 bp, Artificial sequence
  Synthetic oligonucleotide
tacaattccgctcaac

SEQ ID NO: 1438 - DNA, 16 bp, Artificial sequence
  Synthetic oligonucleotide
aagaacgaagacctcc

SEQ ID NO: 1439 - DNA, 16 bp, Artificial sequence
  Synthetic oligonucleotide
ccacttgacggacaag

SEQ ID NO: 1440 - DNA, 16 bp, Artificial sequence
  Synthetic oligonucleotide
gcatgagtagacgagg

SEQ ID NO: 1441 - DNA, 16 bp, Artificial sequence
  Synthetic oligonucleotide
ccttaaatgggctgga

SEQ ID NO: 1442 - DNA, 16 bp, Artificial sequence
  Synthetic oligonucleotide
ccccaactggcatcag

SEQ ID NO: 1443 - DNA, 16 bp, Artificial sequence
  Synthetic oligonucleotide
ccgtaggccaagggtc

SEQ ID NO: 1444 - DNA, 16 bp, Artificial sequence
  Synthetic oligonucleotide
gcttattagcagcagg

SEQ ID NO: 1445 - DNA, 16 bp, Artificial sequence
  Synthetic oligonucleotide
ggaaaggttcgactct

SEQ ID NO: 1446 - DNA, 16 bp, Artificial sequence
  Synthetic oligonucleotide
ggcatataatgacaca

SEQ ID NO: 1447 - DNA, 16 bp, Artificial sequence
  Synthetic oligonucleotide
ctggatagcatagctt

SEQ ID NO: 1448 - DNA, 16 bp, Artificial sequence
  Synthetic oligonucleotide
cgccacctcggagctt

SEQ ID NO: 1449 - DNA, 16 bp, Artificial sequence
  Synthetic oligonucleotide
aagcactgaaacccca

SEQ ID NO: 1450 - DNA, 16 bp, Artificial sequence
  Synthetic oligonucleotide
gagcatgcggccaccc

SEQ ID NO: 1451 - DNA, 16 bp, Artificial sequence
  Synthetic oligonucleotide
gcctttgacaaggata

SEQ ID NO: 1452 - DNA, 16 bp, Artificial sequence
  Synthetic oligonucleotide
cacgacatggttgggc

SEQ ID NO: 1453 - DNA, 16 bp, Artificial sequence
  Synthetic oligonucleotide
gacactagaggtggac

SEQ ID NO: 1454 - DNA, 16 bp, Artificial sequence
  Synthetic oligonucleotide
gatcaacagatatggt

SEQ ID NO: 1455 - DNA, 16 bp, Artificial sequence
  Synthetic oligonucleotide
ctaggaggtcccctcc

SEQ ID NO: 1456 - DNA, 16 bp, Artificial sequence
  Synthetic oligonucleotide
gtgaacaccatggtcc

SEQ ID NO: 1457 - DNA, 16 bp, Artificial sequence
  Synthetic oligonucleotide
ctccaaaggacctttc

SEQ ID NO: 1458 - DNA, 16 bp, Artificial sequence
  Synthetic oligonucleotide
atagactttccctgga

SEQ ID NO: 1459 - DNA, 16 bp, Artificial sequence
  Synthetic oligonucleotide
tcctatgagttggtcc

SEQ ID NO: 1460 - DNA, 16 bp, Artificial sequence
  Synthetic oligonucleotide
tcctaagtgagacaga

SEQ ID NO: 1461 - DNA, 16 bp, Artificial sequence
  Synthetic oligonucleotide
cacaaacctcccggta

SEQ ID NO: 1462 - DNA, 16 bp, Artificial sequence
  Synthetic oligonucleotide
ttgaagatgcctagag

SEQ ID NO: 1463 - DNA, 16 bp, Artificial sequence
  Synthetic oligonucleotide
cggccatagctgtggg

SEQ ID NO: 1464 - DNA, 16 bp, Artificial sequence
  Synthetic oligonucleotide
gcagtgtggacacggc

SEQ ID NO: 1465 - DNA, 16 bp, Artificial sequence
  Synthetic oligonucleotide
ggagtcccctaccccc

SEQ ID NO: 1466 - DNA, 16 bp, Artificial sequence
  Synthetic oligonucleotide
cagcactcaggttggc

SEQ ID NO: 1467 - DNA, 16 bp, Artificial sequence
  Synthetic oligonucleotide
ggctggcggctgtgtc

SEQ ID NO: 1468 - DNA, 16 bp, Artificial sequence
  Synthetic oligonucleotide
ctcagacccgggctgg

SEQ ID NO: 1469 - DNA, 16 bp, Artificial sequence
  Synthetic oligonucleotide
tccaagcctgtccgcg

SEQ ID NO: 1470 - DNA, 16 bp, Artificial sequence
  Synthetic oligonucleotide
gggactccagtcccgt

SEQ ID NO: 1471 - DNA, 16 bp, Artificial sequence
  Synthetic oligonucleotide
aggtagaaggcggaca

SEQ ID NO: 1472 - DNA, 16 bp, Artificial sequence
  Synthetic oligonucleotide
ctcctcccgactgctg

SEQ ID NO: 1473 - DNA, 16 bp, Artificial sequence
  Synthetic oligonucleotide
gcccgccgggcaccaa

SEQ ID NO: 1474 - DNA, 16 bp, Artificial sequence
  Synthetic oligonucleotide
ccatggactgcacctg

SEQ ID NO: 1475 - DNA, 16 bp, Artificial sequence
  Synthetic oligonucleotide
cgtctcgatgtccttg

SEQ ID NO: 1476 - DNA, 16 bp, Artificial sequence
  Synthetic oligonucleotide
ggatctgcggtgatgt

SEQ ID NO: 1477 - DNA, 16 bp, Artificial sequence
  Synthetic oligonucleotide
gctccttgcccgccag

SEQ ID NO: 1478 - DNA, 16 bp, Artificial sequence
  Synthetic oligonucleotide
ggcggaactgctcctc

SEQ ID NO: 1479 - DNA, 16 bp, Artificial sequence
  Synthetic oligonucleotide
tccgctctttcatcca

SEQ ID NO: 1480 - DNA, 16 bp, Artificial sequence
  Synthetic oligonucleotide
cagtagtgaatcgccc

SEQ ID NO: 1481 - DNA, 16 bp, Artificial sequence
  Synthetic oligonucleotide
tgtcggtccagctctc

SEQ ID NO: 1482 - DNA, 16 bp, Artificial sequence
  Synthetic oligonucleotide
cccggagcatgatgag

SEQ ID NO: 1483 - DNA, 16 bp, Artificial sequence
  Synthetic oligonucleotide
ctccttgttgagccac

SEQ ID NO: 1484 - DNA, 16 bp, Artificial sequence
  Synthetic oligonucleotide
gtctggcttccggatg

SEQ ID NO: 1485 - DNA, 16 bp, Artificial sequence
  Synthetic oligonucleotide
agactgcccgttttcc

SEQ ID NO: 1486 - DNA, 16 bp, Artificial sequence
  Synthetic oligonucleotide
ccagggtcccgaaggc

SEQ ID NO: 1487 - DNA, 16 bp, Artificial sequence
  Synthetic oligonucleotide
tggactgcctgtggcc

SEQ ID NO: 1488 - DNA, 16 bp, Artificial sequence
  Synthetic oligonucleotide
tgtgccagagctagag

SEQ ID NO: 1489 - DNA, 16 bp, Artificial sequence
  Synthetic oligonucleotide
gccttgccccgcaacc

SEQ ID NO: 1490 - DNA, 16 bp, Artificial sequence
  Synthetic oligonucleotide
agccctcaaagcaact

SEQ ID NO: 1491 - DNA, 16 bp, Artificial sequence
  Synthetic oligonucleotide
ggaccggttcccacct

SEQ ID NO: 1492 - DNA, 16 bp, Artificial sequence
  Synthetic oligonucleotide
ttgcttcaaacaaggt

SEQ ID NO: 1493 - DNA, 16 bp, Artificial sequence
  Synthetic oligonucleotide
aaagtgaaggactcca

SEQ ID NO: 1494 - DNA, 16 bp, Artificial sequence
  Synthetic oligonucleotide
cattcctgcgccctga

SEQ ID NO: 1495 - DNA, 16 bp, Artificial sequence
  Synthetic oligonucleotide
tggttgttggtctgta

SEQ ID NO: 1496 - DNA, 16 bp, Artificial sequence
  Synthetic oligonucleotide
tgccgtgtttctgcgg

SEQ ID NO: 1497 - DNA, 16 bp, Artificial sequence
  Synthetic oligonucleotide
cccgagaggtgtgtgt

SEQ ID NO: 1498 - DNA, 16 bp, Artificial sequence
  Synthetic oligonucleotide
cagcgatgtgagaagg

SEQ ID NO: 1499 - DNA, 16 bp, Artificial sequence
  Synthetic oligonucleotide
aaacagggactcataa

SEQ ID NO: 1500 - DNA, 16 bp, Artificial sequence
  Synthetic oligonucleotide
tgaggccccttggccg

SEQ ID NO: 1501 - DNA, 16 bp, Artificial sequence
  Synthetic oligonucleotide
cacacggatgtcaccg

SEQ ID NO: 1502 - DNA, 16 bp, Artificial sequence
  Synthetic oligonucleotide
gcttgccacaggacag

SEQ ID NO: 1503 - DNA, 16 bp, Artificial sequence
  Synthetic oligonucleotide
cactaaggtccctggc

SEQ ID NO: 1504 - DNA, 16 bp, Artificial sequence
  Synthetic oligonucleotide
ccatccgacccccagc

SEQ ID NO: 1505 - DNA, 16 bp, Artificial sequence
  Synthetic oligonucleotide
gcgccgtcataatcct

SEQ ID NO: 1506 - DNA, 16 bp, Artificial sequence
  Synthetic oligonucleotide
ctggttacaagaagct

SEQ ID NO: 1507 - DNA, 16 bp, Artificial sequence
  Synthetic oligonucleotide
tgccagggtaccccca

SEQ ID NO: 1508 - DNA, 16 bp, Artificial sequence
  Synthetic oligonucleotide
tagaaatgagcacctt

SEQ ID NO: 1509 - DNA, 16 bp, Artificial sequence
  Synthetic oligonucleotide
gctgaaccatggcctg

SEQ ID NO: 1510 - DNA, 16 bp, Artificial sequence
  Synthetic oligonucleotide
cctcagacttggttga

SEQ ID NO: 1511 - DNA, 16 bp, Artificial sequence
  Synthetic oligonucleotide
attaacttccccgggt

SEQ ID NO: 1512 - DNA, 16 bp, Artificial sequence
  Synthetic oligonucleotide
gttgagtgtacatgag

SEQ ID NO: 1513 - DNA, 16 bp, Artificial sequence
  Synthetic oligonucleotide
cccgcatacgccgtac

SEQ ID NO: 1514 - DNA, 16 bp, Artificial sequence
  Synthetic oligonucleotide
actacaattccgctca

SEQ ID NO: 1515 - DNA, 16 bp, Artificial sequence
  Synthetic oligonucleotide
ggaaagaacgaagacc

SEQ ID NO: 1516 - DNA, 16 bp, Artificial sequence
  Synthetic oligonucleotide
tcccacttgacggaca

SEQ ID NO: 1517 - DNA, 16 bp, Artificial sequence
  Synthetic oligonucleotide
cagcatgagtagacga

SEQ ID NO: 1518 - DNA, 16 bp, Artificial sequence
  Synthetic oligonucleotide
ggcctactgagctgtc

SEQ ID NO: 1519 - DNA, 16 bp, Artificial sequence
  Synthetic oligonucleotide
ctagaaatgtgcccct

SEQ ID NO: 1520 - DNA, 16 bp, Artificial sequence
  Synthetic oligonucleotide
gctccgtaggccaagg

SEQ ID NO: 1521 - DNA, 16 bp, Artificial sequence
  Synthetic oligonucleotide
gaagggattcatgtgc

SEQ ID NO: 1522 - DNA, 16 bp, Artificial sequence
  Synthetic oligonucleotide
ggaggaaaggttcgac

SEQ ID NO: 1523 - DNA, 16 bp, Artificial sequence
  Synthetic oligonucleotide
agcttttgccaggaag

SEQ ID NO: 1524 - DNA, 16 bp, Artificial sequence
  Synthetic oligonucleotide
ccctggatagcatagc

SEQ ID NO: 1525 - DNA, 16 bp, Artificial sequence
  Synthetic oligonucleotide
ctccaaatgtgccgtc

SEQ ID NO: 1526 - DNA, 16 bp, Artificial sequence
  Synthetic oligonucleotide
cgcaagcactgaaacc

SEQ ID NO: 1527 - DNA, 16 bp, Artificial sequence
  Synthetic oligonucleotide
ccccgatgcctggagg

SEQ ID NO: 1528 - DNA, 16 bp, Artificial sequence
  Synthetic oligonucleotide
gatatagcaaagcttg

SEQ ID NO: 1529 - DNA, 16 bp, Artificial sequence
  Synthetic oligonucleotide
agccacgacatggttg

SEQ ID NO: 1530 - DNA, 16 bp, Artificial sequence
  Synthetic oligonucleotide
tatcatccagcaccta

SEQ ID NO: 1531 - DNA, 16 bp, Artificial sequence
  Synthetic oligonucleotide
agcgagatcaacagat

SEQ ID NO: 1532 - DNA, 16 bp, Artificial sequence
  Synthetic oligonucleotide
ccctaggaggtcccct

SEQ ID NO: 1533 - DNA, 16 bp, Artificial sequence
  Synthetic oligonucleotide
gggcatggtcacaatg

SEQ ID NO: 1534 - DNA, 16 bp, Artificial sequence
  Synthetic oligonucleotide
gtgcatctgtactgcc

SEQ ID NO: 1535 - DNA, 16 bp, Artificial sequence
  Synthetic oligonucleotide
ctcgagtattcataga

SEQ ID NO: 1536 - DNA, 16 bp, Artificial sequence
  Synthetic oligonucleotide
tctgacagggtcctat

SEQ ID NO: 1537 - DNA, 16 bp, Artificial sequence
  Synthetic oligonucleotide
cagtactaaaactcct

SEQ ID NO: 1538 - DNA, 16 bp, Artificial sequence
  Synthetic oligonucleotide
gaatactctggagtca

SEQ ID NO: 1539 - DNA, 16 bp, Artificial sequence
  Synthetic oligonucleotide
ggacatgtcagttctc

SEQ ID NO: 1540 - DNA, 16 bp, Artificial sequence
  Synthetic oligonucleotide
tctccttgttgagcca

SEQ ID NO: 1541 - DNA, 16 bp, Artificial sequence
  Synthetic oligonucleotide
gaggactgggtctgtg

SEQ ID NO: 1542 - DNA, 16 bp, Artificial sequence
  Synthetic oligonucleotide
gggagtcccctacccc

SEQ ID NO: 1543 - DNA, 16 bp, Artificial sequence
  Synthetic oligonucleotide
gcagcactcaggttgg

SEQ ID NO: 1544 - DNA, 16 bp, Artificial sequence
  Synthetic oligonucleotide
tgggctggcggctgtg

SEQ ID NO: 1545 - DNA, 16 bp, Artificial sequence
  Synthetic oligonucleotide
gctcagacccgggctg

SEQ ID NO: 1546 - DNA, 16 bp, Artificial sequence
  Synthetic oligonucleotide
tctccaagcctgtccg

SEQ ID NO: 1547 - DNA, 16 bp, Artificial sequence
  Synthetic oligonucleotide
gactgggactccagtc

SEQ ID NO: 1548 - DNA, 16 bp, Artificial sequence
  Synthetic oligonucleotide
gagaggtagaaggcgg

SEQ ID NO: 1549 - DNA, 16 bp, Artificial sequence
  Synthetic oligonucleotide
gctcctcccgactgct

SEQ ID NO: 1550 - DNA, 16 bp, Artificial sequence
  Synthetic oligonucleotide
agcccgccgggcacca

SEQ ID NO: 1551 - DNA, 16 bp, Artificial sequence
  Synthetic oligonucleotide
ccaccatggactgcac

SEQ ID NO: 1552 - DNA, 16 bp, Artificial sequence
  Synthetic oligonucleotide
gccgtctcgatgtcct

SEQ ID NO: 1553 - DNA, 16 bp, Artificial sequence
  Synthetic oligonucleotide
atgggatctgcggtga

SEQ ID NO: 1554 - DNA, 16 bp, Artificial sequence
  Synthetic oligonucleotide
cagctccttgcccgcc

SEQ ID NO: 1555 - DNA, 16 bp, Artificial sequence
  Synthetic oligonucleotide
tggcggaactgctcct

SEQ ID NO: 1556 - DNA, 16 bp, Artificial sequence
  Synthetic oligonucleotide
agtccgctctttcatc

SEQ ID NO: 1557 - DNA, 16 bp, Artificial sequence
  Synthetic oligonucleotide
cacagtagtgaatcgc

SEQ ID NO: 1558 - DNA, 16 bp, Artificial sequence
  Synthetic oligonucleotide
ctgtcggtccagctct

SEQ ID NO: 1559 - DNA, 16 bp, Artificial sequence
  Synthetic oligonucleotide
tgcccggagcatgatg

SEQ ID NO: 1560 - DNA, 16 bp, Artificial sequence
  Synthetic oligonucleotide
agcggccatagctgtg

SEQ ID NO: 1561 - DNA, 16 bp, Artificial sequence
  Synthetic oligonucleotide
atgtctggcttccgga

SEQ ID NO: 1562 - DNA, 16 bp, Artificial sequence
  Synthetic oligonucleotide
cagactgcccgttttc

SEQ ID NO: 1563 - DNA, 16 bp, Artificial sequence
  Synthetic oligonucleotide
cccagggtcccgaagg

SEQ ID NO: 1564 - DNA, 16 bp, Artificial sequence
  Synthetic oligonucleotide
agatgtctccctgcac

SEQ ID NO: 1565 - DNA, 16 bp, Artificial sequence
  Synthetic oligonucleotide
ctgtgccagagctaga

SEQ ID NO: 1566 - DNA, 16 bp, Artificial sequence
  Synthetic oligonucleotide
ggccttgccccgcaac

SEQ ID NO: 1567 - DNA, 16 bp, Artificial sequence
  Synthetic oligonucleotide
gctaggtcccagcagc

SEQ ID NO: 1568 - DNA, 16 bp, Artificial sequence
  Synthetic oligonucleotide
aggaccggttcccacc

SEQ ID NO: 1569 - DNA, 16 bp, Artificial sequence
  Synthetic oligonucleotide
gacaggctaagaacag

SEQ ID NO: 1570 - DNA, 16 bp, Artificial sequence
  Synthetic oligonucleotide
caaagtgaaggactcc

SEQ ID NO: 1571 - DNA, 16 bp, Artificial sequence
  Synthetic oligonucleotide
acattcctgcgccctg

SEQ ID NO: 1572 - DNA, 16 bp, Artificial sequence
  Synthetic oligonucleotide
ctggttgttggtctgt

SEQ ID NO: 1573 - DNA, 16 bp, Artificial sequence
  Synthetic oligonucleotide
ctgccgtgtttctgcg

SEQ ID NO: 1574 - DNA, 16 bp, Artificial sequence
  Synthetic oligonucleotide
tcccgagaggtgtgtg

SEQ ID NO: 1575 - DNA, 16 bp, Artificial sequence
  Synthetic oligonucleotide
acagcgatgtgagaag

SEQ ID NO: 1576 - DNA, 16 bp, Artificial sequence
  Synthetic oligonucleotide
agtgaaacagggactc

SEQ ID NO: 1577 - DNA, 16 bp, Artificial sequence
  Synthetic oligonucleotide
ctgaggccccttggcc

SEQ ID NO: 1578 - DNA, 16 bp, Artificial sequence
  Synthetic oligonucleotide
acacacggatgtcacc

SEQ ID NO: 1579 - DNA, 16 bp, Artificial sequence
  Synthetic oligonucleotide
acactaaggtccctgg

SEQ ID NO: 1580 - DNA, 16 bp, Artificial sequence
  Synthetic oligonucleotide
tcccatccgaccccca

SEQ ID NO: 1581 - DNA, 16 bp, Artificial sequence
  Synthetic oligonucleotide
tgcgccgtcataatcc

SEQ ID NO: 1582 - DNA, 16 bp, Artificial sequence
  Synthetic oligonucleotide
gctggttacaagaagc

SEQ ID NO: 1583 - DNA, 16 bp, Artificial sequence
  Synthetic oligonucleotide
ggaaagaccccatgcc

SEQ ID NO: 1584 - DNA, 16 bp, Artificial sequence
  Synthetic oligonucleotide
caccgcagaaatctgg

SEQ ID NO: 1585 - DNA, 16 bp, Artificial sequence
  Synthetic oligonucleotide
cgagaatgccccccac

SEQ ID NO: 1586 - DNA, 16 bp, Artificial sequence
  Synthetic oligonucleotide
atcgactgagcaccta

SEQ ID NO: 1587 - DNA, 16 bp, Artificial sequence
  Synthetic oligonucleotide
ccacatggcgggacct

SEQ ID NO: 1588 - DNA, 16 bp, Artificial sequence
  Synthetic oligonucleotide
tatgatgggttgagtg

SEQ ID NO: 1589 - DNA, 16 bp, Artificial sequence
  Synthetic oligonucleotide
ttgaagggccggccac

SEQ ID NO: 1590 - DNA, 16 bp, Artificial sequence
  Synthetic oligonucleotide
gcaactacaattccgc

SEQ ID NO: 1591 - DNA, 16 bp, Artificial sequence
  Synthetic oligonucleotide
ccccaagtggaccatc

SEQ ID NO: 1592 - DNA, 16 bp, Artificial sequence
  Synthetic oligonucleotide
gggcagccagcattat

SEQ ID NO: 1593 - DNA, 16 bp, Artificial sequence
  Synthetic oligonucleotide
cccattgtggccatct

SEQ ID NO: 1594 - DNA, 16 bp, Artificial sequence
  Synthetic oligonucleotide
tcccatgtggcctact

SEQ ID NO: 1595 - DNA, 16 bp, Artificial sequence
  Synthetic oligonucleotide
agatttagtgcagctt

SEQ ID NO: 1596 - DNA, 16 bp, Artificial sequence
  Synthetic oligonucleotide
agtgatggtccaccca

SEQ ID NO: 1597 - DNA, 16 bp, Artificial sequence
  Synthetic oligonucleotide
caagaatctcccatgg

SEQ ID NO: 1598 - DNA, 16 bp, Artificial sequence
  Synthetic oligonucleotide
ggttaactgtgtggtt

SEQ ID NO: 1599 - DNA, 16 bp, Artificial sequence
  Synthetic oligonucleotide
gcagaactcgcttccc

SEQ ID NO: 1600 - DNA, 16 bp, Artificial sequence
  Synthetic oligonucleotide
agctagcccattcaat

SEQ ID NO: 1601 - DNA, 16 bp, Artificial sequence
  Synthetic oligonucleotide
ttatagtttcaagcag

SEQ ID NO: 1602 - DNA, 16 bp, Artificial sequence
  Synthetic oligonucleotide
gagaggtgcgcaagca

SEQ ID NO: 1603 - DNA, 16 bp, Artificial sequence
  Synthetic oligonucleotide
gtgcatggtacccacc

SEQ ID NO: 1604 - DNA, 16 bp, Artificial sequence
  Synthetic oligonucleotide
cctgatatagcaaagc

SEQ ID NO: 1605 - DNA, 16 bp, Artificial sequence
  Synthetic oligonucleotide
ggcagccacgacatgg

SEQ ID NO: 1606 - DNA, 16 bp, Artificial sequence
  Synthetic oligonucleotide
attcatatcatccagc

SEQ ID NO: 1607 - DNA, 16 bp, Artificial sequence
  Synthetic oligonucleotide
ttctagtggaggacac

SEQ ID NO: 1608 - DNA, 16 bp, Artificial sequence
  Synthetic oligonucleotide
ccataatcacgccttc

SEQ ID NO: 1609 - DNA, 16 bp, Artificial sequence
  Synthetic oligonucleotide
tcataggcctataggt

SEQ ID NO: 1610 - DNA, 16 bp, Artificial sequence
  Synthetic oligonucleotide
gggtaacctggtgcat

SEQ ID NO: 1611 - DNA, 16 bp, Artificial sequence
  Synthetic oligonucleotide
tgctcgagtattcata

SEQ ID NO: 1612 - DNA, 16 bp, Artificial sequence
  Synthetic oligonucleotide
tgcaaccccttgttca

SEQ ID NO: 1613 - DNA, 16 bp, Artificial sequence
  Synthetic oligonucleotide
gtgcagtactaaaact

SEQ ID NO: 1614 - DNA, 16 bp, Artificial sequence
  Synthetic oligonucleotide
gagaatactctggagt

SEQ ID NO: 1615 - DNA, 16 bp, Artificial sequence
  Synthetic oligonucleotide
attcactgcgcagaca

SEQ ID NO: 1616 - DNA, 16 bp, Artificial sequence
  Synthetic oligonucleotide
aagcggccatagctgt

SEQ ID NO: 1617 - DNA, 16 bp, Artificial sequence
  Synthetic oligonucleotide
cgttaggacagtctct

SEQ ID NO: 1618 - DNA, 16 bp, Artificial sequence
  Synthetic oligonucleotide
ttctccttgttgagcc

SEQ ID NO: 1619 - DNA, 16 bp, Artificial sequence
  Synthetic oligonucleotide
tggaggactgggtctg

SEQ ID NO: 1620 - DNA, 16 bp, Artificial sequence
  Synthetic oligonucleotide
agggagtcccctaccc

SEQ ID NO: 1621 - DNA, 16 bp, Artificial sequence
  Synthetic oligonucleotide
cagtgccaacttcagg

SEQ ID NO: 1622 - DNA, 16 bp, Artificial sequence
  Synthetic oligonucleotide
ttgggctggcggctgt

SEQ ID NO: 1623 - DNA, 16 bp, Artificial sequence
  Synthetic oligonucleotide
tgctcagacccgggct

SEQ ID NO: 1624 - DNA, 16 bp, Artificial sequence
  Synthetic oligonucleotide
cccccgctgccgcctt

SEQ ID NO: 1625 - DNA, 16 bp, Artificial sequence
  Synthetic oligonucleotide
ggactgggactccagt

SEQ ID NO: 1626 - DNA, 16 bp, Artificial sequence
  Synthetic oligonucleotide
tgtcaaagtaggagag

SEQ ID NO: 1627 - DNA, 16 bp, Artificial sequence
  Synthetic oligonucleotide
tggctcctcccgactg

SEQ ID NO: 1628 - DNA, 16 bp, Artificial sequence
  Synthetic oligonucleotide
tcagcccgccgggcac

SEQ ID NO: 1629 - DNA, 16 bp, Artificial sequence
  Synthetic oligonucleotide
acttcgcccaccacca

SEQ ID NO: 1630 - DNA, 16 bp, Artificial sequence
  Synthetic oligonucleotide
aggccgtctcgatgtc

SEQ ID NO: 1631 - DNA, 16 bp, Artificial sequence
  Synthetic oligonucleotide
ccatgggatctgcggt

SEQ ID NO: 1632 - DNA, 16 bp, Artificial sequence
  Synthetic oligonucleotide
ggcgcacagctccttg

SEQ ID NO: 1633 - DNA, 16 bp, Artificial sequence
  Synthetic oligonucleotide
cgctggcggaactgct

SEQ ID NO: 1634 - DNA, 16 bp, Artificial sequence
  Synthetic oligonucleotide
aagtccgctctttcat

SEQ ID NO: 1635 - DNA, 16 bp, Artificial sequence
  Synthetic oligonucleotide
gcacagtagtgaatcg

SEQ ID NO: 1636 - DNA, 16 bp, Artificial sequence
  Synthetic oligonucleotide
gctgtcggtccagctc

SEQ ID NO: 1637 - DNA, 16 bp, Artificial sequence
  Synthetic oligonucleotide
ctgcccggagcatgat

SEQ ID NO: 1638 - DNA, 16 bp, Artificial sequence
  Synthetic oligonucleotide
gatgtctggcttccgg

SEQ ID NO: 1639 - DNA, 16 bp, Artificial sequence
  Synthetic oligonucleotide
agcagactgcccgttt

SEQ ID NO: 1640 - DNA, 16 bp, Artificial sequence
  Synthetic oligonucleotide
ccccagggtcccgaag

SEQ ID NO: 1641 - DNA, 16 bp, Artificial sequence
  Synthetic oligonucleotide
attatccattcccggg

SEQ ID NO: 1642 - DNA, 16 bp, Artificial sequence
  Synthetic oligonucleotide
cgtctcccctgtgcca

SEQ ID NO: 1643 - DNA, 16 bp, Artificial sequence
  Synthetic oligonucleotide
gggccttgccccgcaa

SEQ ID NO: 1644 - DNA, 16 bp, Artificial sequence
  Synthetic oligonucleotide
gagctaggtcccagca

SEQ ID NO: 1645 - DNA, 16 bp, Artificial sequence
  Synthetic oligonucleotide
caggaccggttcccac

SEQ ID NO: 1646 - DNA, 16 bp, Artificial sequence
  Synthetic oligonucleotide
tgacaggctaagaaca

SEQ ID NO: 1647 - DNA, 16 bp, Artificial sequence
  Synthetic oligonucleotide
gttaggacaaagtgaa

SEQ ID NO: 1648 - DNA, 16 bp, Artificial sequence
  Synthetic oligonucleotide
aacattcctgcgccct

SEQ ID NO: 1649 - DNA, 16 bp, Artificial sequence
  Synthetic oligonucleotide
cctggttgttggtctg

SEQ ID NO: 1650 - DNA, 16 bp, Artificial sequence
  Synthetic oligonucleotide
tctgccgtgtttctgc

SEQ ID NO: 1651 - DNA, 16 bp, Artificial sequence
  Synthetic oligonucleotide
ctcccgagaggtgtgt

SEQ ID NO: 1652 - DNA, 16 bp, Artificial sequence
  Synthetic oligonucleotide
gacagcgatgtgagaa

SEQ ID NO: 1653 - DNA, 16 bp, Artificial sequence
  Synthetic oligonucleotide
gcctcttcagcagtga

SEQ ID NO: 1654 - DNA, 16 bp, Artificial sequence
  Synthetic oligonucleotide
cctgaggccccttggc

SEQ ID NO: 1655 - DNA, 16 bp, Artificial sequence
  Synthetic oligonucleotide
aacacacggatgtcac

SEQ ID NO: 1656 - DNA, 16 bp, Artificial sequence
  Synthetic oligonucleotide
cacactaaggtccctg

SEQ ID NO: 1657 - DNA, 16 bp, Artificial sequence
  Synthetic oligonucleotide
ggtcccatccgacccc

SEQ ID NO: 1658 - DNA, 16 bp, Artificial sequence
  Synthetic oligonucleotide
ggtgcgccgtcataat

SEQ ID NO: 1659 - DNA, 16 bp, Artificial sequence
  Synthetic oligonucleotide
agctggttacaagaag

SEQ ID NO: 1660 - DNA, 16 bp, Artificial sequence
  Synthetic oligonucleotide
ggcaaagtgcgccccc

SEQ ID NO: 1661 - DNA, 16 bp, Artificial sequence
  Synthetic oligonucleotide
ctccaccgcagaaatc

SEQ ID NO: 1662 - DNA, 16 bp, Artificial sequence
  Synthetic oligonucleotide
tccgagaatgcccccc

SEQ ID NO: 1663 - DNA, 16 bp, Artificial sequence
  Synthetic oligonucleotide
gagcatcgactgagca

SEQ ID NO: 1664 - DNA, 16 bp, Artificial sequence
  Synthetic oligonucleotide
gaaaagtgacccgccc

SEQ ID NO: 1665 - DNA, 16 bp, Artificial sequence
  Synthetic oligonucleotide
gtggagattgagatgg

SEQ ID NO: 1666 - DNA, 16 bp, Artificial sequence
  Synthetic oligonucleotide
ccttgaagggccggcc

SEQ ID NO: 1667 - DNA, 16 bp, Artificial sequence
  Synthetic oligonucleotide
catagcaactacaatt

SEQ ID NO: 1668 - DNA, 16 bp, Artificial sequence
  Synthetic oligonucleotide
gtacagaggcccaccg

SEQ ID NO: 1669 - DNA, 16 bp, Artificial sequence
  Synthetic oligonucleotide
tgctttgccgggccct

SEQ ID NO: 1670 - DNA, 16 bp, Artificial sequence
  Synthetic oligonucleotide
acagaccaccccgctg

SEQ ID NO: 1671 - DNA, 16 bp, Artificial sequence
  Synthetic oligonucleotide
ccccattgagaagagc

SEQ ID NO: 1672 - DNA, 16 bp, Artificial sequence
  Synthetic oligonucleotide
ggagagatttagtgca

SEQ ID NO: 1673 - DNA, 16 bp, Artificial sequence
  Synthetic oligonucleotide
atgcaattcagcccag

SEQ ID NO: 1674 - DNA, 16 bp, Artificial sequence
  Synthetic oligonucleotide
cagcaccctttcatca

SEQ ID NO: 1675 - DNA, 16 bp, Artificial sequence
  Synthetic oligonucleotide
gttaatggttaactgt

SEQ ID NO: 1676 - DNA, 16 bp, Artificial sequence
  Synthetic oligonucleotide
ccacagctagcccatt

SEQ ID NO: 1677 - DNA, 16 bp, Artificial sequence
  Synthetic oligonucleotide
tctcgagggttattta

SEQ ID NO: 1678 - DNA, 16 bp, Artificial sequence
  Synthetic oligonucleotide
ctggagaggtgcgcaa

SEQ ID NO: 1679 - DNA, 16 bp, Artificial sequence
  Synthetic oligonucleotide
caacactctcaaggtg

SEQ ID NO: 1680 - DNA, 16 bp, Artificial sequence
  Synthetic oligonucleotide
ggcggatgagcaaact

SEQ ID NO: 1681 - DNA, 16 bp, Artificial sequence
  Synthetic oligonucleotide
ctaagctggttatggg

SEQ ID NO: 1682 - DNA, 16 bp, Artificial sequence
  Synthetic oligonucleotide
gaattcatatcatcca

SEQ ID NO: 1683 - DNA, 16 bp, Artificial sequence
  Synthetic oligonucleotide
gtggagtgtacattct

SEQ ID NO: 1684 - DNA, 16 bp, Artificial sequence
  Synthetic oligonucleotide
gaggactagagactca

SEQ ID NO: 1685 - DNA, 16 bp, Artificial sequence
  Synthetic oligonucleotide
gcctcataggcctata

SEQ ID NO: 1686 - DNA, 16 bp, Artificial sequence
  Synthetic oligonucleotide
tgaacttggttcaggg

SEQ ID NO: 1687 - DNA, 16 bp, Artificial sequence
  Synthetic oligonucleotide
gtaaatgtgctcgagt

SEQ ID NO: 1688 - DNA, 16 bp, Artificial sequence
  Synthetic oligonucleotide
ttgcatgcaacccctt

SEQ ID NO: 1689 - DNA, 16 bp, Artificial sequence
  Synthetic oligonucleotide
gtggatttggagctcg

SEQ ID NO: 1690 - DNA, 16 bp, Artificial sequence
  Synthetic oligonucleotide
ggcagagaatactctg

SEQ ID NO: 1691 - DNA, 16 bp, Artificial sequence
  Synthetic oligonucleotide
tgccattcactgcgca

SEQ ID NO: 1692 - DNA, 16 bp, Artificial sequence
  Synthetic oligonucleotide
gccagggtacccccac

SEQ ID NO: 1693 - DNA, 16 bp, Artificial sequence
  Synthetic oligonucleotide
tgcagtcgcccacccc

SEQ ID NO: 1694 - DNA, 16 bp, Artificial sequence
  Synthetic oligonucleotide
cctgcctgcagtcgcc

SEQ ID NO: 1695 - DNA, 16 bp, Artificial sequence
  Synthetic oligonucleotide
agtgcgccccctccaa

SEQ ID NO: 1696 - DNA, 16 bp, Artificial sequence
  Synthetic oligonucleotide
ctggcaaagtgcgccc

SEQ ID NO: 1697 - DNA, 16 bp, Artificial sequence
  Synthetic oligonucleotide
atctgcacggcggcct

SEQ ID NO: 1698 - DNA, 16 bp, Artificial sequence
  Synthetic oligonucleotide
cccaccatttgtctgt

SEQ ID NO: 1699 - DNA, 16 bp, Artificial sequence
  Synthetic oligonucleotide
ggagctccgagaatgc

SEQ ID NO: 1700 - DNA, 16 bp, Artificial sequence
  Synthetic oligonucleotide
ttgcacttcctgccag

SEQ ID NO: 1701 - DNA, 16 bp, Artificial sequence
  Synthetic oligonucleotide
tcccggtttttgcact

SEQ ID NO: 1702 - DNA, 16 bp, Artificial sequence
  Synthetic oligonucleotide
gggttctcccggtttt

SEQ ID NO: 1703 - DNA, 16 bp, Artificial sequence
  Synthetic oligonucleotide
taaaaagtgggttctc

SEQ ID NO: 1704 - DNA, 16 bp, Artificial sequence
  Synthetic oligonucleotide
cacaacgacctcagtg

SEQ ID NO: 1705 - DNA, 16 bp, Artificial sequence
  Synthetic oligonucleotide
cagtgactcagccccc

SEQ ID NO: 1706 - DNA, 16 bp, Artificial sequence
  Synthetic oligonucleotide
acgccgtacctcccag

SEQ ID NO: 1707 - DNA, 16 bp, Artificial sequence
  Synthetic oligonucleotide
ccccgcatacgccgta

SEQ ID NO: 1708 - DNA, 16 bp, Artificial sequence
  Synthetic oligonucleotide
gccacagtaccttccc

SEQ ID NO: 1709 - DNA, 16 bp, Artificial sequence
  Synthetic oligonucleotide
gagttgatgtctggag

SEQ ID NO: 1710 - DNA, 16 bp, Artificial sequence
  Synthetic oligonucleotide
tccctggagttgatgt

SEQ ID NO: 1711 - DNA, 16 bp, Artificial sequence
  Synthetic oligonucleotide
tctgggcacaaaactg

SEQ ID NO: 1712 - DNA, 16 bp, Artificial sequence
  Synthetic oligonucleotide
ctagatctccgggctt

SEQ ID NO: 1713 - DNA, 16 bp, Artificial sequence
  Synthetic oligonucleotide
gggtttcttctagatc

SEQ ID NO: 1714 - DNA, 16 bp, Artificial sequence
  Synthetic oligonucleotide
atgagtagacgaggtg

SEQ ID NO: 1715 - DNA, 16 bp, Artificial sequence
  Synthetic oligonucleotide
tggattaaggctcagc

SEQ ID NO: 1716 - DNA, 16 bp, Artificial sequence
  Synthetic oligonucleotide
ccacatgtctggatta

SEQ ID NO: 1717 - DNA, 16 bp, Artificial sequence
  Synthetic oligonucleotide
tctggattaagccaca

SEQ ID NO: 1718 - DNA, 16 bp, Artificial sequence
  Synthetic oligonucleotide
tcgagttgatctcttc

SEQ ID NO: 1719 - DNA, 16 bp, Artificial sequence
  Synthetic oligonucleotide
ccaaacctcgagttga

SEQ ID NO: 1720 - DNA, 16 bp, Artificial sequence
  Synthetic oligonucleotide
tcagtgatggtccacc

SEQ ID NO: 1721 - DNA, 16 bp, Artificial sequence
  Synthetic oligonucleotide
catgcaattcagccca

SEQ ID NO: 1722 - DNA, 16 bp, Artificial sequence
  Synthetic oligonucleotide
cccgctttcctaccca

SEQ ID NO: 1723 - DNA, 16 bp, Artificial sequence
  Synthetic oligonucleotide
acatcacccgctttcc

SEQ ID NO: 1724 - DNA, 16 bp, Artificial sequence
  Synthetic oligonucleotide
caggctttcacccaca

SEQ ID NO: 1725 - DNA, 16 bp, Artificial sequence
  Synthetic oligonucleotide
ccacgcccaggctttc

SEQ ID NO: 1726 - DNA, 16 bp, Artificial sequence
  Synthetic oligonucleotide
gtgagcaccagtgcca

SEQ ID NO: 1727 - DNA, 16 bp, Artificial sequence
  Synthetic oligonucleotide
agaacggcactgtgag

SEQ ID NO: 1728 - DNA, 16 bp, Artificial sequence
  Synthetic oligonucleotide
cccaacctgcaactag

SEQ ID NO: 1729 - DNA, 16 bp, Artificial sequence
  Synthetic oligonucleotide
gggctggtgtgcccaa

SEQ ID NO: 1730 - DNA, 16 bp, Artificial sequence
  Synthetic oligonucleotide
ttggcttactggtcag

SEQ ID NO: 1731 - DNA, 16 bp, Artificial sequence
  Synthetic oligonucleotide
ggtcctagctccaaca

SEQ ID NO: 1732 - DNA, 16 bp, Artificial sequence
  Synthetic oligonucleotide
agcctcggtcctagct

SEQ ID NO: 1733 - DNA, 16 bp, Artificial sequence
  Synthetic oligonucleotide
aatctactccccacca

SEQ ID NO: 1734 - DNA, 16 bp, Artificial sequence
  Synthetic oligonucleotide
ccaaggaatctactcc

SEQ ID NO: 1735 - DNA, 16 bp, Artificial sequence
  Synthetic oligonucleotide
gccctatacctaaatg

SEQ ID NO: 1736 - DNA, 16 bp, Artificial sequence
  Synthetic oligonucleotide
gaccttgccctatacc

SEQ ID NO: 1737 - DNA, 16 bp, Artificial sequence
  Synthetic oligonucleotide
tcccattcaagggctc

SEQ ID NO: 1738 - DNA, 16 bp, Artificial sequence
  Synthetic oligonucleotide
gaagggtgttcccttt

SEQ ID NO: 1739 - DNA, 16 bp, Artificial sequence
  Synthetic oligonucleotide
ggctccctgatccatc

SEQ ID NO: 1740 - DNA, 16 bp, Artificial sequence
  Synthetic oligonucleotide
ggtgccctactgggac

SEQ ID NO: 1741 - DNA, 16 bp, Artificial sequence
  Synthetic oligonucleotide
atttatggtgccctac

SEQ ID NO: 1742 - DNA, 16 bp, Artificial sequence
  Synthetic oligonucleotide
cctctctaacagtgac

SEQ ID NO: 1743 - DNA, 16 bp, Artificial sequence
  Synthetic oligonucleotide
gatatacgctcctaat

SEQ ID NO: 1744 - DNA, 16 bp, Artificial sequence
  Synthetic oligonucleotide
taccaacagatatacg

SEQ ID NO: 1745 - DNA, 16 bp, Artificial sequence
  Synthetic oligonucleotide
acatcaagacaggctc

SEQ ID NO: 1746 - DNA, 16 bp, Artificial sequence
  Synthetic oligonucleotide
cggcttggttttgccc

SEQ ID NO: 1747 - DNA, 16 bp, Artificial sequence
  Synthetic oligonucleotide
ccgccccggcttggtt

SEQ ID NO: 1748 - DNA, 16 bp, Artificial sequence
  Synthetic oligonucleotide
ccacgggccgccccgg

SEQ ID NO: 1749 - DNA, 16 bp, Artificial sequence
  Synthetic oligonucleotide
cttgctccccacgggc

SEQ ID NO: 1750 - DNA, 16 bp, Artificial sequence
  Synthetic oligonucleotide
tggcctcaacacaagc

SEQ ID NO: 1751 - DNA, 16 bp, Artificial sequence
  Synthetic oligonucleotide
gacatgggtcaggact

SEQ ID NO: 1752 - DNA, 16 bp, Artificial sequence
  Synthetic oligonucleotide
aagctgcacagagttc

SEQ ID NO: 1753 - DNA, 16 bp, Artificial sequence
  Synthetic oligonucleotide
tccacggttgtcccca

SEQ ID NO: 1754 - DNA, 16 bp, Artificial sequence
  Synthetic oligonucleotide
ttcctagtatccacgg

SEQ ID NO: 1755 - DNA, 16 bp, Artificial sequence
  Synthetic oligonucleotide
aaggacttcctagtat

SEQ ID NO: 1756 - DNA, 16 bp, Artificial sequence
  Synthetic oligonucleotide
cgagtattcatagact

SEQ ID NO: 1757 - DNA, 16 bp, Artificial sequence
  Synthetic oligonucleotide
aatgtgctcgagtatt

SEQ ID NO: 1758 - DNA, 16 bp, Artificial sequence
  Synthetic oligonucleotide
cttactccttgactca

SEQ ID NO: 1759 - DNA, 16 bp, Artificial sequence
  Synthetic oligonucleotide
tatgagttggtcctgt

SEQ ID NO: 1760 - DNA, 16 bp, Artificial sequence
  Synthetic oligonucleotide
agggtcctatgagttg

SEQ ID NO: 1761 - DNA, 16 bp, Artificial sequence
  Synthetic oligonucleotide
tggtctctgacagggt

SEQ ID NO: 1762 - DNA, 16 bp, Artificial sequence
  Synthetic oligonucleotide
tcatccaggccgctgc

SEQ ID NO: 1763 - DNA, 16 bp, Artificial sequence
  Synthetic oligonucleotide
tccaccctgccgctgc

SEQ ID NO: 1764 - DNA, 16 bp, Artificial sequence
  Synthetic oligonucleotide
ttcattggcagccacc

SEQ ID NO: 1765 - DNA, 16 bp, Artificial sequence
  Synthetic oligonucleotide
tcccggcttcattggc

SEQ ID NO: 1766 - DNA, 16 bp, Artificial sequence
  Synthetic oligonucleotide
ggccagtcccggcttc

SEQ ID NO: 1767 - DNA, 16 bp, Artificial sequence
  Synthetic oligonucleotide
tcactgcgcagacact

SEQ ID NO: 1768 - DNA, 16 bp, Artificial sequence
  Synthetic oligonucleotide
gccacatgtctggatt

SEQ ID NO: 1769 - DNA, 16 bp, Artificial sequence
  Synthetic oligonucleotide
atgccagggtaccccc

SEQ ID NO: 1770 - DNA, 16 bp, Artificial sequence
  Synthetic oligonucleotide
ctgcagtcgcccaccc

SEQ ID NO: 1771 - DNA, 16 bp, Artificial sequence
  Synthetic oligonucleotide
gccccctccaagtcct

SEQ ID NO: 1772 - DNA, 16 bp, Artificial sequence
  Synthetic oligonucleotide
aagtgcgccccctcca

SEQ ID NO: 1773 - DNA, 16 bp, Artificial sequence
  Synthetic oligonucleotide
ggcggcctcccctcag

SEQ ID NO: 1774 - DNA, 16 bp, Artificial sequence
  Synthetic oligonucleotide
catctgcacggcggcc

SEQ ID NO: 1775 - DNA, 16 bp, Artificial sequence
  Synthetic oligonucleotide
ccccaccatttgtctg

SEQ ID NO: 1776 - DNA, 16 bp, Artificial sequence
  Synthetic oligonucleotide
gggagctccgagaatg

SEQ ID NO: 1777 - DNA, 16 bp, Artificial sequence
  Synthetic oligonucleotide
gtttttgcacttcctg

SEQ ID NO: 1778 - DNA, 16 bp, Artificial sequence
  Synthetic oligonucleotide
ctcccggtttttgcac

SEQ ID NO: 1779 - DNA, 16 bp, Artificial sequence
  Synthetic oligonucleotide
tgggttctcccggttt

SEQ ID NO: 1780 - DNA, 16 bp, Artificial sequence
  Synthetic oligonucleotide
gtaaaaagtgggttct

SEQ ID NO: 1781 - DNA, 16 bp, Artificial sequence
  Synthetic oligonucleotide
tcacaacgacctcagt

SEQ ID NO: 1782 - DNA, 16 bp, Artificial sequence
  Synthetic oligonucleotide
tacctcccagcttgcc

SEQ ID NO: 1783 - DNA, 16 bp, Artificial sequence
  Synthetic oligonucleotide
tacgccgtacctccca

SEQ ID NO: 1784 - DNA, 16 bp, Artificial sequence
  Synthetic oligonucleotide
agccccgcatacgccg

SEQ ID NO: 1785 - DNA, 16 bp, Artificial sequence
  Synthetic oligonucleotide
ggccacagtaccttcc

SEQ ID NO: 1786 - DNA, 16 bp, Artificial sequence
  Synthetic oligonucleotide
ggagttgatgtctgga

SEQ ID NO: 1787 - DNA, 16 bp, Artificial sequence
  Synthetic oligonucleotide
gtccctggagttgatg

SEQ ID NO: 1788 - DNA, 16 bp, Artificial sequence
  Synthetic oligonucleotide
tccgggctttccccac

SEQ ID NO: 1789 - DNA, 16 bp, Artificial sequence
  Synthetic oligonucleotide
tctagatctccgggct

SEQ ID NO: 1790 - DNA, 16 bp, Artificial sequence
  Synthetic oligonucleotide
cgaggtgggtttcttc

SEQ ID NO: 1791 - DNA, 16 bp, Artificial sequence
  Synthetic oligonucleotide
catgagtagacgaggt

SEQ ID NO: 1792 - DNA, 16 bp, Artificial sequence
  Synthetic oligonucleotide
tctggattaaggctca

SEQ ID NO: 1793 - DNA, 16 bp, Artificial sequence
  Synthetic oligonucleotide
ttctggattaagccac

SEQ ID NO: 1794 - DNA, 16 bp, Artificial sequence
  Synthetic oligonucleotide
cctcgagttgatctct

SEQ ID NO: 1795 - DNA, 16 bp, Artificial sequence
  Synthetic oligonucleotide
tcccaaacctcgagtt

SEQ ID NO: 1796 - DNA, 16 bp, Artificial sequence
  Synthetic oligonucleotide
atcagtgatggtccac

SEQ ID NO: 1797 - DNA, 16 bp, Artificial sequence
  Synthetic oligonucleotide
gtgccatgcaattcag

SEQ ID NO: 1798 - DNA, 16 bp, Artificial sequence
  Synthetic oligonucleotide
acccgctttcctaccc

SEQ ID NO: 1799 - DNA, 16 bp, Artificial sequence
  Synthetic oligonucleotide
cacatcacccgctttc

SEQ ID NO: 1800 - DNA, 16 bp, Artificial sequence
  Synthetic oligonucleotide
ccaggctttcacccac

SEQ ID NO: 1801 - DNA, 16 bp, Artificial sequence
  Synthetic oligonucleotide
gtgccacgcccaggct

SEQ ID NO: 1802 - DNA, 16 bp, Artificial sequence
  Synthetic oligonucleotide
agtgagcaccagtgcc

SEQ ID NO: 1803 - DNA, 16 bp, Artificial sequence
  Synthetic oligonucleotide
agagaacggcactgtg

SEQ ID NO: 1804 - DNA, 16 bp, Artificial sequence
  Synthetic oligonucleotide
tgcccaacctgcaact

SEQ ID NO: 1805 - DNA, 16 bp, Artificial sequence
  Synthetic oligonucleotide
agggctggtgtgccca

SEQ ID NO: 1806 - DNA, 16 bp, Artificial sequence
  Synthetic oligonucleotide
cttggcttactggtca

SEQ ID NO: 1807 - DNA, 16 bp, Artificial sequence
  Synthetic oligonucleotide
cggtcctagctccaac

SEQ ID NO: 1808 - DNA, 16 bp, Artificial sequence
  Synthetic oligonucleotide
aagcctcggtcctagc

SEQ ID NO: 1809 - DNA, 16 bp, Artificial sequence
  Synthetic oligonucleotide
gaatctactccccacc

SEQ ID NO: 1810 - DNA, 16 bp, Artificial sequence
  Synthetic oligonucleotide
tgccaaggaatctact

SEQ ID NO: 1811 - DNA, 16 bp, Artificial sequence
  Synthetic oligonucleotide
tgccctatacctaaat

SEQ ID NO: 1812 - DNA, 16 bp, Artificial sequence
  Synthetic oligonucleotide
gctcctttaagtgaca

SEQ ID NO: 1813 - DNA, 16 bp, Artificial sequence
  Synthetic oligonucleotide
ctcccattcaagggct

SEQ ID NO: 1814 - DNA, 16 bp, Artificial sequence
  Synthetic oligonucleotide
ggaagggtgttccctt

SEQ ID NO: 1815 - DNA, 16 bp, Artificial sequence
  Synthetic oligonucleotide
gggctccctgatccat

SEQ ID NO: 1816 - DNA, 16 bp, Artificial sequence
  Synthetic oligonucleotide
tggtgccctactggga

SEQ ID NO: 1817 - DNA, 16 bp, Artificial sequence
  Synthetic oligonucleotide
catttatggtgcccta

SEQ ID NO: 1818 - DNA, 16 bp, Artificial sequence
  Synthetic oligonucleotide
tcctctctaacagtga

SEQ ID NO: 1819 - DNA, 16 bp, Artificial sequence
  Synthetic oligonucleotide
agatatacgctcctaa

SEQ ID NO: 1820 - DNA, 16 bp, Artificial sequence
  Synthetic oligonucleotide
agaagattaccaacag

SEQ ID NO: 1821 - DNA, 16 bp, Artificial sequence
  Synthetic oligonucleotide
tacatcaagacaggct

SEQ ID NO: 1822 - DNA, 16 bp, Artificial sequence
  Synthetic oligonucleotide
ccggcttggttttgcc

SEQ ID NO: 1823 - DNA, 16 bp, Artificial sequence
  Synthetic oligonucleotide
gccgccccggcttggt

SEQ ID NO: 1824 - DNA, 16 bp, Artificial sequence
  Synthetic oligonucleotide
cccacgggccgccccg

SEQ ID NO: 1825 - DNA, 16 bp, Artificial sequence
  Synthetic oligonucleotide
ccttgctccccacggg

SEQ ID NO: 1826 - DNA, 16 bp, Artificial sequence
  Synthetic oligonucleotide
ctggcctcaacacaag

SEQ ID NO: 1827 - DNA, 16 bp, Artificial sequence
  Synthetic oligonucleotide
cagtgctgcaatgcca

SEQ ID NO: 1828 - DNA, 16 bp, Artificial sequence
  Synthetic oligonucleotide
gcatcctcacagtctg

SEQ ID NO: 1829 - DNA, 16 bp, Artificial sequence
  Synthetic oligonucleotide
tatccacggttgtccc

SEQ ID NO: 1830 - DNA, 16 bp, Artificial sequence
  Synthetic oligonucleotide
cttcctagtatccacg

SEQ ID NO: 1831 - DNA, 16 bp, Artificial sequence
  Synthetic oligonucleotide
ttgtaacagtggttcc

SEQ ID NO: 1832 - DNA, 16 bp, Artificial sequence
  Synthetic oligonucleotide
tcgagtattcatagac

SEQ ID NO: 1833 - DNA, 16 bp, Artificial sequence
  Synthetic oligonucleotide
aaatgtgctcgagtat

SEQ ID NO: 1834 - DNA, 16 bp, Artificial sequence
  Synthetic oligonucleotide
tcttactccttgactc

SEQ ID NO: 1835 - DNA, 16 bp, Artificial sequence
  Synthetic oligonucleotide
ctatgagttggtcctg

SEQ ID NO: 1836 - DNA, 16 bp, Artificial sequence
  Synthetic oligonucleotide
cagggtcctatgagtt

SEQ ID NO: 1837 - DNA, 16 bp, Artificial sequence
  Synthetic oligonucleotide
ctggtctctgacaggg

SEQ ID NO: 1838 - DNA, 16 bp, Artificial sequence
  Synthetic oligonucleotide
accacagtagtgaatc

SEQ ID NO: 1839 - DNA, 16 bp, Artificial sequence
  Synthetic oligonucleotide
cctccaccctgccgct

SEQ ID NO: 1840 - DNA, 16 bp, Artificial sequence
  Synthetic oligonucleotide
gcttcattggcagcca

SEQ ID NO: 1841 - DNA, 16 bp, Artificial sequence
  Synthetic oligonucleotide
gtcccggcttcattgg

SEQ ID NO: 1842 - DNA, 16 bp, Artificial sequence
  Synthetic oligonucleotide
gtcagttctctagtat

SEQ ID NO: 1843 - DNA, 16 bp, Artificial sequence
  Synthetic oligonucleotide
ttcactgcgcagacac

SEQ ID NO: 1844 - DNA, 16 bp, Artificial sequence
  Synthetic oligonucleotide
catgccagggtacccc

SEQ ID NO: 1845 - DNA, 16 bp, Artificial sequence
  Synthetic oligonucleotide
cctgcagtcgcccacc

SEQ ID NO: 1846 - DNA, 16 bp, Artificial sequence
  Synthetic oligonucleotide
cgccccctccaagtcc

SEQ ID NO: 1847 - DNA, 16 bp, Artificial sequence
  Synthetic oligonucleotide
aaagtgcgccccctcc

SEQ ID NO: 1848 - DNA, 16 bp, Artificial sequence
  Synthetic oligonucleotide
acggcggcctcccctc

SEQ ID NO: 1849 - DNA, 16 bp, Artificial sequence
  Synthetic oligonucleotide
gcatctgcacggcggc

SEQ ID NO: 1850 - DNA, 16 bp, Artificial sequence
  Synthetic oligonucleotide
gagaatgccccccacc

SEQ ID NO: 1851 - DNA, 16 bp, Artificial sequence
  Synthetic oligonucleotide
tgggagctccgagaat

SEQ ID NO: 1852 - DNA, 16 bp, Artificial sequence
  Synthetic oligonucleotide
ggtttttgcacttcct

SEQ ID NO: 1853 - DNA, 16 bp, Artificial sequence
  Synthetic oligonucleotide
tctcccggtttttgca

SEQ ID NO: 1854 - DNA, 16 bp, Artificial sequence
  Synthetic oligonucleotide
agtgggttctcccggt

SEQ ID NO: 1855 - DNA, 16 bp, Artificial sequence
  Synthetic oligonucleotide
cgacctcagtggtaaa

SEQ ID NO: 1856 - DNA, 16 bp, Artificial sequence
  Synthetic oligonucleotide
actcacaacgacctca

SEQ ID NO: 1857 - DNA, 16 bp, Artificial sequence
  Synthetic oligonucleotide
gtacctcccagcttgc

SEQ ID NO: 1858 - DNA, 16 bp, Artificial sequence
  Synthetic oligonucleotide
atacgccgtacctccc

SEQ ID NO: 1859 - DNA, 16 bp, Artificial sequence
  Synthetic oligonucleotide
cagccccgcatacgcc

SEQ ID NO: 1860 - DNA, 16 bp, Artificial sequence
  Synthetic oligonucleotide
tgatgtctggaggctc

SEQ ID NO: 1861 - DNA, 16 bp, Artificial sequence
  Synthetic oligonucleotide
tggagttgatgtctgg

SEQ ID NO: 1862 - DNA, 16 bp, Artificial sequence
  Synthetic oligonucleotide
tgtccctggagttgat

SEQ ID NO: 1863 - DNA, 16 bp, Artificial sequence
  Synthetic oligonucleotide
ctccgggctttcccca

SEQ ID NO: 1864 - DNA, 16 bp, Artificial sequence
  Synthetic oligonucleotide
ttctagatctccgggc

SEQ ID NO: 1865 - DNA, 16 bp, Artificial sequence
  Synthetic oligonucleotide
acgaggtgggtttctt

SEQ ID NO: 1866 - DNA, 16 bp, Artificial sequence
  Synthetic oligonucleotide
agcatgagtagacgag

SEQ ID NO: 1867 - DNA, 16 bp, Artificial sequence
  Synthetic oligonucleotide
gtctggattaaggctc

SEQ ID NO: 1868 - DNA, 16 bp, Artificial sequence
  Synthetic oligonucleotide
agccacatgtctggat

SEQ ID NO: 1869 - DNA, 16 bp, Artificial sequence
  Synthetic oligonucleotide
ttgatctcttctggat

SEQ ID NO: 1870 - DNA, 16 bp, Artificial sequence
  Synthetic oligonucleotide
acctcgagttgatctc

SEQ ID NO: 1871 - DNA, 16 bp, Artificial sequence
  Synthetic oligonucleotide
atggtccacccatggg

SEQ ID NO: 1872 - DNA, 16 bp, Artificial sequence
  Synthetic oligonucleotide
catcagtgatggtcca

SEQ ID NO: 1873 - DNA, 16 bp, Artificial sequence
  Synthetic oligonucleotide
tgtgccatgcaattca

SEQ ID NO: 1874 - DNA, 16 bp, Artificial sequence
  Synthetic oligonucleotide
cacccgctttcctacc

SEQ ID NO: 1875 - DNA, 16 bp, Artificial sequence
  Synthetic oligonucleotide
cccacatcacccgctt

SEQ ID NO: 1876 - DNA, 16 bp, Artificial sequence
  Synthetic oligonucleotide
gcccaggctttcaccc

SEQ ID NO: 1877 - DNA, 16 bp, Artificial sequence
  Synthetic oligonucleotide
accagtgccacgccca

SEQ ID NO: 1878 - DNA, 16 bp, Artificial sequence
  Synthetic oligonucleotide
cagtgagcaccagtgc

SEQ ID NO: 1879 - DNA, 16 bp, Artificial sequence
  Synthetic oligonucleotide
tcaaggttctgggctg

SEQ ID NO: 1880 - DNA, 16 bp, Artificial sequence
  Synthetic oligonucleotide
tggtgtgcccaacctg

SEQ ID NO: 1881 - DNA, 16 bp, Artificial sequence
  Synthetic oligonucleotide
ttactggtcaggcagc

SEQ ID NO: 1882 - DNA, 16 bp, Artificial sequence
  Synthetic oligonucleotide
gcttggcttactggtc

SEQ ID NO: 1883 - DNA, 16 bp, Artificial sequence
  Synthetic oligonucleotide
tcggtcctagctccaa

SEQ ID NO: 1884 - DNA, 16 bp, Artificial sequence
  Synthetic oligonucleotide
caagcctcggtcctag

SEQ ID NO: 1885 - DNA, 16 bp, Artificial sequence
  Synthetic oligonucleotide
ggaatctactccccac

SEQ ID NO: 1886 - DNA, 16 bp, Artificial sequence
  Synthetic oligonucleotide
tacctaaatgccaagg

SEQ ID NO: 1887 - DNA, 16 bp, Artificial sequence
  Synthetic oligonucleotide
ttgccctatacctaaa

SEQ ID NO: 1888 - DNA, 16 bp, Artificial sequence
  Synthetic oligonucleotide
ggctcctttaagtgac

SEQ ID NO: 1889 - DNA, 16 bp, Artificial sequence
  Synthetic oligonucleotide
tctcccattcaagggc

SEQ ID NO: 1890 - DNA, 16 bp, Artificial sequence
  Synthetic oligonucleotide
tgatccatctccagtt

SEQ ID NO: 1891 - DNA, 16 bp, Artificial sequence
  Synthetic oligonucleotide
cctactgggacagcag

SEQ ID NO: 1892 - DNA, 16 bp, Artificial sequence
  Synthetic oligonucleotide
atggtgccctactggg

SEQ ID NO: 1893 - DNA, 16 bp, Artificial sequence
  Synthetic oligonucleotide
gacatttatggtgccc

SEQ ID NO: 1894 - DNA, 16 bp, Artificial sequence
  Synthetic oligonucleotide
acgctcctaataatac

SEQ ID NO: 1895 - DNA, 16 bp, Artificial sequence
  Synthetic oligonucleotide
cagatatacgctccta

SEQ ID NO: 1896 - DNA, 16 bp, Artificial sequence
  Synthetic oligonucleotide
cagaagattaccaaca

SEQ ID NO: 1897 - DNA, 16 bp, Artificial sequence
  Synthetic oligonucleotide
gggcctgagacttaag

SEQ ID NO: 1898 - DNA, 16 bp, Artificial sequence
  Synthetic oligonucleotide
cccggcttggttttgc

SEQ ID NO: 1899 - DNA, 16 bp, Artificial sequence
  Synthetic oligonucleotide
gggccgccccggcttg

SEQ ID NO: 1900 - DNA, 16 bp, Artificial sequence
  Synthetic oligonucleotide
tccccacgggccgccc

SEQ ID NO: 1901 - DNA, 16 bp, Artificial sequence
  Synthetic oligonucleotide
gccttgctccccacgg

SEQ ID NO: 1902 - DNA, 16 bp, Artificial sequence
  Synthetic oligonucleotide
catctggcctcaacac

SEQ ID NO: 1903 - DNA, 16 bp, Artificial sequence
  Synthetic oligonucleotide
tcagtgctgcaatgcc

SEQ ID NO: 1904 - DNA, 16 bp, Artificial sequence
  Synthetic oligonucleotide
ctgacatcctgcatcc

SEQ ID NO: 1905 - DNA, 16 bp, Artificial sequence
  Synthetic oligonucleotide
agtatccacggttgtc

SEQ ID NO: 1906 - DNA, 16 bp, Artificial sequence
  Synthetic oligonucleotide
acttcctagtatccac

SEQ ID NO: 1907 - DNA, 16 bp, Artificial sequence
  Synthetic oligonucleotide
cttgtaacagtggttc

SEQ ID NO: 1908 - DNA, 16 bp, Artificial sequence
  Synthetic oligonucleotide
gctcgagtattcatag

SEQ ID NO: 1909 - DNA, 16 bp, Artificial sequence
  Synthetic oligonucleotide
taaatgtgctcgagta

SEQ ID NO: 1910 - DNA, 16 bp, Artificial sequence
  Synthetic oligonucleotide
ttcttactccttgact

SEQ ID NO: 1911 - DNA, 16 bp, Artificial sequence
  Synthetic oligonucleotide
cctatgagttggtcct

SEQ ID NO: 1912 - DNA, 16 bp, Artificial sequence
  Synthetic oligonucleotide
acagggtcctatgagt

SEQ ID NO: 1913 - DNA, 16 bp, Artificial sequence
  Synthetic oligonucleotide
actggtctctgacagg

SEQ ID NO: 1914 - DNA, 16 bp, Artificial sequence
  Synthetic oligonucleotide
caccacagtagtgaat

SEQ ID NO: 1915 - DNA, 16 bp, Artificial sequence
  Synthetic oligonucleotide
ccacccgagcccccgc

SEQ ID NO: 1916 - DNA, 16 bp, Artificial sequence
  Synthetic oligonucleotide
ggcttcattggcagcc

SEQ ID NO: 1917 - DNA, 16 bp, Artificial sequence
  Synthetic oligonucleotide
agtcccggcttcattg

SEQ ID NO: 1918 - DNA, 16 bp, Artificial sequence
  Synthetic oligonucleotide
tgtcagttctctagta

SEQ ID NO: 1919 - DNA, 16 bp, Artificial sequence
  Synthetic oligonucleotide
cattcactgcgcagac

SEQ ID NO: 1920 - DNA, 16 bp, Artificial sequence
  Synthetic oligonucleotide
ccatgccagggtaccc

SEQ ID NO: 1921 - DNA, 16 bp, Artificial sequence
  Synthetic oligonucleotide
gcctgcagtcgcccac

SEQ ID NO: 1922 - DNA, 16 bp, Artificial sequence
  Synthetic oligonucleotide
gcgccccctccaagtc

SEQ ID NO: 1923 - DNA, 16 bp, Artificial sequence
  Synthetic oligonucleotide
caaagtgcgccccctc

SEQ ID NO: 1924 - DNA, 16 bp, Artificial sequence
  Synthetic oligonucleotide
cacggcggcctcccct

SEQ ID NO: 1925 - DNA, 16 bp, Artificial sequence
  Synthetic oligonucleotide
tctgcatctgcacggc

SEQ ID NO: 1926 - DNA, 16 bp, Artificial sequence
  Synthetic oligonucleotide
gctccgagaatgcccc

SEQ ID NO: 1927 - DNA, 16 bp, Artificial sequence
  Synthetic oligonucleotide
ctgggagctccgagaa

SEQ ID NO: 1928 - DNA, 16 bp, Artificial sequence
  Synthetic oligonucleotide
cggtttttgcacttcc

SEQ ID NO: 1929 - DNA, 16 bp, Artificial sequence
  Synthetic oligonucleotide
ttctcccggtttttgc

SEQ ID NO: 1930 - DNA, 16 bp, Artificial sequence
  Synthetic oligonucleotide
aagtgggttctcccgg

SEQ ID NO: 1931 - DNA, 16 bp, Artificial sequence
  Synthetic oligonucleotide
acgacctcagtggtaa

SEQ ID NO: 1932 - DNA, 16 bp, Artificial sequence
  Synthetic oligonucleotide
tactcacaacgacctc

SEQ ID NO: 1933 - DNA, 16 bp, Artificial sequence
  Synthetic oligonucleotide
cgtacctcccagcttg

SEQ ID NO: 1934 - DNA, 16 bp, Artificial sequence
  Synthetic oligonucleotide
catacgccgtacctcc

SEQ ID NO: 1935 - DNA, 16 bp, Artificial sequence
  Synthetic oligonucleotide
ccagccccgcatacgc

SEQ ID NO: 1936 - DNA, 16 bp, Artificial sequence
  Synthetic oligonucleotide
ttgatgtctggaggct

SEQ ID NO: 1937 - DNA, 16 bp, Artificial sequence
  Synthetic oligonucleotide
ctggagttgatgtctg

SEQ ID NO: 1938 - DNA, 16 bp, Artificial sequence
  Synthetic oligonucleotide
actgtccaggccaact

SEQ ID NO: 1939 - DNA, 16 bp, Artificial sequence
  Synthetic oligonucleotide
atctccgggctttccc

SEQ ID NO: 1940 - DNA, 16 bp, Artificial sequence
  Synthetic oligonucleotide
cttctagatctccggg

SEQ ID NO: 1941 - DNA, 16 bp, Artificial sequence
  Synthetic oligonucleotide
agacgaggtgggtttc

SEQ ID NO: 1942 - DNA, 16 bp, Artificial sequence
  Synthetic oligonucleotide
tcagcatgagtagacg

SEQ ID NO: 1943 - DNA, 16 bp, Artificial sequence
  Synthetic oligonucleotide
tgtctggattaaggct

SEQ ID NO: 1944 - DNA, 16 bp, Artificial sequence
  Synthetic oligonucleotide
gattaagccacatgtc

SEQ ID NO: 1945 - DNA, 16 bp, Artificial sequence
  Synthetic oligonucleotide
gttgatctcttctgga

SEQ ID NO: 1946 - DNA, 16 bp, Artificial sequence
  Synthetic oligonucleotide
aacctcgagttgatct

SEQ ID NO: 1947 - DNA, 16 bp, Artificial sequence
  Synthetic oligonucleotide
gatggtccacccatgg

SEQ ID NO: 1948 - DNA, 16 bp, Artificial sequence
  Synthetic oligonucleotide
ccatcagtgatggtcc

SEQ ID NO: 1949 - DNA, 16 bp, Artificial sequence
  Synthetic oligonucleotide
ctgtgccatgcaattc

SEQ ID NO: 1950 - DNA, 16 bp, Artificial sequence
  Synthetic oligonucleotide
tcacccgctttcctac

SEQ ID NO: 1951 - DNA, 16 bp, Artificial sequence
  Synthetic oligonucleotide
acccacatcacccgct

SEQ ID NO: 1952 - DNA, 16 bp, Artificial sequence
  Synthetic oligonucleotide
cgcccaggctttcacc

SEQ ID NO: 1953 - DNA, 16 bp, Artificial sequence
  Synthetic oligonucleotide
gcaccagtgccacgcc

SEQ ID NO: 1954 - DNA, 16 bp, Artificial sequence
  Synthetic oligonucleotide
acggcactgtgagccc

SEQ ID NO: 1955 - DNA, 16 bp, Artificial sequence
  Synthetic oligonucleotide
aacctgcaactaggcg

SEQ ID NO: 1956 - DNA, 16 bp, Artificial sequence
  Synthetic oligonucleotide
ctggtgtgcccaacct

SEQ ID NO: 1957 - DNA, 16 bp, Artificial sequence
  Synthetic oligonucleotide
cttactggtcaggcag

SEQ ID NO: 1958 - DNA, 16 bp, Artificial sequence
  Synthetic oligonucleotide
ggcttggcttactggt

SEQ ID NO: 1959 - DNA, 16 bp, Artificial sequence
  Synthetic oligonucleotide
ctcggtcctagctcca

SEQ ID NO: 1960 - DNA, 16 bp, Artificial sequence
  Synthetic oligonucleotide
ccaagcctcggtccta

SEQ ID NO: 1961 - DNA, 16 bp, Artificial sequence
  Synthetic oligonucleotide
aggaatctactcccca

SEQ ID NO: 1962 - DNA, 16 bp, Artificial sequence
  Synthetic oligonucleotide
atacctaaatgccaag

SEQ ID NO: 1963 - DNA, 16 bp, Artificial sequence
  Synthetic oligonucleotide
cttgccctatacctaa

SEQ ID NO: 1964 - DNA, 16 bp, Artificial sequence
  Synthetic oligonucleotide
gggctcctttaagtga

SEQ ID NO: 1965 - DNA, 16 bp, Artificial sequence
  Synthetic oligonucleotide
gggtgttccctttgat

SEQ ID NO: 1966 - DNA, 16 bp, Artificial sequence
  Synthetic oligonucleotide
ctgatccatctccagt

SEQ ID NO: 1967 - DNA, 16 bp, Artificial sequence
  Synthetic oligonucleotide
gccctactgggacagc

SEQ ID NO: 1968 - DNA, 16 bp, Artificial sequence
  Synthetic oligonucleotide
tatggtgccctactgg

SEQ ID NO: 1969 - DNA, 16 bp, Artificial sequence
  Synthetic oligonucleotide
gtgacatttatggtgc

SEQ ID NO: 1970 - DNA, 16 bp, Artificial sequence
  Synthetic oligonucleotide
atacgctcctaataat

SEQ ID NO: 1971 - DNA, 16 bp, Artificial sequence
  Synthetic oligonucleotide
aacagatatacgctcc

SEQ ID NO: 1972 - DNA, 16 bp, Artificial sequence
  Synthetic oligonucleotide
ggcagaagattaccaa

SEQ ID NO: 1973 - DNA, 16 bp, Artificial sequence
  Synthetic oligonucleotide
aggcccttttccctga

SEQ ID NO: 1974 - DNA, 16 bp, Artificial sequence
  Synthetic oligonucleotide
ccccggcttggttttg

SEQ ID NO: 1975 - DNA, 16 bp, Artificial sequence
  Synthetic oligonucleotide
cgggccgccccggctt

SEQ ID NO: 1976 - DNA, 16 bp, Artificial sequence
  Synthetic oligonucleotide
gctccccacgggccgc

SEQ ID NO: 1977 - DNA, 16 bp, Artificial sequence
  Synthetic oligonucleotide
cagtcagaggccttgc

SEQ ID NO: 1978 - DNA, 16 bp, Artificial sequence
  Synthetic oligonucleotide
atgggtcaggactgcc

SEQ ID NO: 1979 - DNA, 16 bp, Artificial sequence
  Synthetic oligonucleotide
ttcagtgctgcaatgc

SEQ ID NO: 1980 - DNA, 16 bp, Artificial sequence
  Synthetic oligonucleotide
ggttgtccccagctct

SEQ ID NO: 1981 - DNA, 16 bp, Artificial sequence
  Synthetic oligonucleotide
tagtatccacggttgt

SEQ ID NO: 1982 - DNA, 16 bp, Artificial sequence
  Synthetic oligonucleotide
gacttcctagtatcca

SEQ ID NO: 1983 - DNA, 16 bp, Artificial sequence
  Synthetic oligonucleotide
acttgtaacagtggtt

SEQ ID NO: 1984 - DNA, 16 bp, Artificial sequence
  Synthetic oligonucleotide
gtgctcgagtattcat

SEQ ID NO: 1985 - DNA, 16 bp, Artificial sequence
  Synthetic oligonucleotide
tgtaaatgtgctcgag

SEQ ID NO: 1986 - DNA, 16 bp, Artificial sequence
  Synthetic oligonucleotide
gagttggtcctgtttc

SEQ ID NO: 1987 - DNA, 16 bp, Artificial sequence
  Synthetic oligonucleotide
gtcctatgagttggtc

SEQ ID NO: 1988 - DNA, 16 bp, Artificial sequence
  Synthetic oligonucleotide
gacagggtcctatgag

SEQ ID NO: 1989 - DNA, 16 bp, Artificial sequence
  Synthetic oligonucleotide
cactggtctctgacag

SEQ ID NO: 1990 - DNA, 16 bp, Artificial sequence
  Synthetic oligonucleotide
tcaccacagtagtgaa

SEQ ID NO: 1991 - DNA, 16 bp, Artificial sequence
  Synthetic oligonucleotide
attggcagccacccct

SEQ ID NO: 1992 - DNA, 16 bp, Artificial sequence
  Synthetic oligonucleotide
cggcttcattggcagc

SEQ ID NO: 1993 - DNA, 16 bp, Artificial sequence
  Synthetic oligonucleotide
cagtcccggcttcatt

SEQ ID NO: 1994 - DNA, 16 bp, Artificial sequence
  Synthetic oligonucleotide
ctgcgcagacactggg

SEQ ID NO: 1995 - DNA, 16 bp, Artificial sequence
  Synthetic oligonucleotide
ccattcactgcgcaga

SEQ ID NO: 1996 - DNA, 16 bp, Artificial sequence
  Synthetic oligonucleotide
gaaagaccccatgcca

SEQ ID NO: 1997 - DNA, 16 bp, Artificial sequence
  Synthetic oligonucleotide
tgcctgcagtcgccca

SEQ ID NO: 1998 - DNA, 16 bp, Artificial sequence
  Synthetic oligonucleotide
tgcgccccctccaagt

SEQ ID NO: 1999 - DNA, 16 bp, Artificial sequence
  Synthetic oligonucleotide
gcaaagtgcgccccct

SEQ ID NO: 2000 - DNA, 16 bp, Artificial sequence
  Synthetic oligonucleotide
ctgcacggcggcctcc

SEQ ID NO: 2001 - DNA, 16 bp, Artificial sequence
  Synthetic oligonucleotide
ctctgcatctgcacgg

SEQ ID NO: 2002 - DNA, 16 bp, Artificial sequence
  Synthetic oligonucleotide
agctccgagaatgccc

SEQ ID NO: 2003 - DNA, 16 bp, Artificial sequence
  Synthetic oligonucleotide
cctgggagctccgaga

SEQ ID NO: 2004 - DNA, 16 bp, Artificial sequence
  Synthetic oligonucleotide
ccggtttttgcacttc

SEQ ID NO: 2005 - DNA, 16 bp, Artificial sequence
  Synthetic oligonucleotide
gttctcccggtttttg

SEQ ID NO: 2006 - DNA, 16 bp, Artificial sequence
  Synthetic oligonucleotide
aaagtgggttctcccg

SEQ ID NO: 2007 - DNA, 16 bp, Artificial sequence
  Synthetic oligonucleotide
aacgacctcagtggta

SEQ ID NO: 2008 - DNA, 16 bp, Artificial sequence
  Synthetic oligonucleotide
atactcacaacgacct

SEQ ID NO: 2009 - DNA, 16 bp, Artificial sequence
  Synthetic oligonucleotide
ccgtacctcccagctt

SEQ ID NO: 2010 - DNA, 16 bp, Artificial sequence
  Synthetic oligonucleotide
cgcatacgccgtacct

SEQ ID NO: 2011 - DNA, 16 bp, Artificial sequence
  Synthetic oligonucleotide
tccagccccgcatacg

SEQ ID NO: 2012 - DNA, 16 bp, Artificial sequence
  Synthetic oligonucleotide
gttgatgtctggaggc

SEQ ID NO: 2013 - DNA, 16 bp, Artificial sequence
  Synthetic oligonucleotide
cctggagttgatgtct

SEQ ID NO: 2014 - DNA, 16 bp, Artificial sequence
  Synthetic oligonucleotide
aactgtccaggccaac

SEQ ID NO: 2015 - DNA, 16 bp, Artificial sequence
  Synthetic oligonucleotide
agatctccgggctttc

SEQ ID NO: 2016 - DNA, 16 bp, Artificial sequence
  Synthetic oligonucleotide
tcttctagatctccgg

SEQ ID NO: 2017 - DNA, 16 bp, Artificial sequence
  Synthetic oligonucleotide
tagacgaggtgggttt

SEQ ID NO: 2018 - DNA, 16 bp, Artificial sequence
  Synthetic oligonucleotide
ctcagcatgagtagac

SEQ ID NO: 2019 - DNA, 16 bp, Artificial sequence
  Synthetic oligonucleotide
atgtctggattaaggc

SEQ ID NO: 2020 - DNA, 16 bp, Artificial sequence
  Synthetic oligonucleotide
tggattaagccacatg

SEQ ID NO: 2021 - DNA, 16 bp, Artificial sequence
  Synthetic oligonucleotide
gagttgatctcttctg

SEQ ID NO: 2022 - DNA, 16 bp, Artificial sequence
  Synthetic oligonucleotide
aaacctcgagttgatc

SEQ ID NO: 2023 - DNA, 16 bp, Artificial sequence
  Synthetic oligonucleotide
tgatggtccacccatg

SEQ ID NO: 2024 - DNA, 16 bp, Artificial sequence
  Synthetic oligonucleotide
cagcccaggattaaat

SEQ ID NO: 2025 - DNA, 16 bp, Artificial sequence
  Synthetic oligonucleotide
tctgtgccatgcaatt

SEQ ID NO: 2026 - DNA, 16 bp, Artificial sequence
  Synthetic oligonucleotide
atcacccgctttccta

SEQ ID NO: 2027 - DNA, 16 bp, Artificial sequence
  Synthetic oligonucleotide
ggctttcacccacatc

SEQ ID NO: 2028 - DNA, 16 bp, Artificial sequence
  Synthetic oligonucleotide
acgcccaggctttcac

SEQ ID NO: 2029 - DNA, 16 bp, Artificial sequence
  Synthetic oligonucleotide
agcaccagtgccacgc

SEQ ID NO: 2030 - DNA, 16 bp, Artificial sequence
  Synthetic oligonucleotide
aacggcactgtgagcc

SEQ ID NO: 2031 - DNA, 16 bp, Artificial sequence
  Synthetic oligonucleotide
caacctgcaactaggc

SEQ ID NO: 2032 - DNA, 16 bp, Artificial sequence
  Synthetic oligonucleotide
gctggtgtgcccaacc

SEQ ID NO: 2033 - DNA, 16 bp, Artificial sequence
  Synthetic oligonucleotide
gcttactggtcaggca

SEQ ID NO: 2034 - DNA, 16 bp, Artificial sequence
  Synthetic oligonucleotide
gggcttggcttactgg

SEQ ID NO: 2035 - DNA, 16 bp, Artificial sequence
  Synthetic oligonucleotide
cctcggtcctagctcc

SEQ ID NO: 2036 - DNA, 16 bp, Artificial sequence
  Synthetic oligonucleotide
accaagcctcggtcct

SEQ ID NO: 2037 - DNA, 16 bp, Artificial sequence
  Synthetic oligonucleotide
aaggaatctactcccc

SEQ ID NO: 2038 - DNA, 16 bp, Artificial sequence
  Synthetic oligonucleotide
tatacctaaatgccaa

SEQ ID NO: 2039 - DNA, 16 bp, Artificial sequence
  Synthetic oligonucleotide
ccttgccctataccta

SEQ ID NO: 2040 - DNA, 16 bp, Artificial sequence
  Synthetic oligonucleotide
agggctcctttaagtg

SEQ ID NO: 2041 - DNA, 16 bp, Artificial sequence
  Synthetic oligonucleotide
agggtgttccctttga

SEQ ID NO: 2042 - DNA, 16 bp, Artificial sequence
  Synthetic oligonucleotide
cctgatccatctccag

SEQ ID NO: 2043 - DNA, 16 bp, Artificial sequence
  Synthetic oligonucleotide
tgccctactgggacag

SEQ ID NO: 2044 - DNA, 16 bp, Artificial sequence
  Synthetic oligonucleotide
ttatggtgccctactg

SEQ ID NO: 2045 - DNA, 16 bp, Artificial sequence
  Synthetic oligonucleotide
ctctaacagtgacatt

SEQ ID NO: 2046 - DNA, 16 bp, Artificial sequence
  Synthetic oligonucleotide
tatacgctcctaataa

SEQ ID NO: 2047 - DNA, 16 bp, Artificial sequence
  Synthetic oligonucleotide
caacagatatacgctc

SEQ ID NO: 2048 - DNA, 16 bp, Artificial sequence
  Synthetic oligonucleotide
aggcagaagattacca

SEQ ID NO: 2049 - DNA, 16 bp, Artificial sequence
  Synthetic oligonucleotide
gcttggttttgcccag

SEQ ID NO: 2050 - DNA, 16 bp, Artificial sequence
  Synthetic oligonucleotide
gccccggcttggtttt

SEQ ID NO: 2051 - DNA, 16 bp, Artificial sequence
  Synthetic oligonucleotide
acgggccgccccggct

SEQ ID NO: 2052 - DNA, 16 bp, Artificial sequence
  Synthetic oligonucleotide
tgctccccacgggccg

SEQ ID NO: 2053 - DNA, 16 bp, Artificial sequence
  Synthetic oligonucleotide
ctcaacacaagcagtc

SEQ ID NO: 2054 - DNA, 16 bp, Artificial sequence
  Synthetic oligonucleotide
catgggtcaggactgc

SEQ ID NO: 2055 - DNA, 16 bp, Artificial sequence
  Synthetic oligonucleotide
gctgcacagagttcag

SEQ ID NO: 2056 - DNA, 16 bp, Artificial sequence
  Synthetic oligonucleotide
acggttgtccccagct

SEQ ID NO: 2057 - DNA, 16 bp, Artificial sequence
  Synthetic oligonucleotide
ctagtatccacggttg

SEQ ID NO: 2058 - DNA, 16 bp, Artificial sequence
  Synthetic oligonucleotide
ggacttcctagtatcc

SEQ ID NO: 2059 - DNA, 16 bp, Artificial sequence
  Synthetic oligonucleotide
aacttgtaacagtggt

SEQ ID NO: 2060 - DNA, 16 bp, Artificial sequence
  Synthetic oligonucleotide
tgtgctcgagtattca

SEQ ID NO: 2061 - DNA, 16 bp, Artificial sequence
  Synthetic oligonucleotide
atgtaaatgtgctcga

SEQ ID NO: 2062 - DNA, 16 bp, Artificial sequence
  Synthetic oligonucleotide
tgagttggtcctgttt

SEQ ID NO: 2063 - DNA, 16 bp, Artificial sequence
  Synthetic oligonucleotide
ggtcctatgagttggt

SEQ ID NO: 2064 - DNA, 16 bp, Artificial sequence
  Synthetic oligonucleotide
ctctgacagggtccta

SEQ ID NO: 2065 - DNA, 16 bp, Artificial sequence
  Synthetic oligonucleotide
atccaggccgctgcag

SEQ ID NO: 2066 - DNA, 16 bp, Artificial sequence
  Synthetic oligonucleotide
ctcaccacagtagtga

SEQ ID NO: 2067 - DNA, 16 bp, Artificial sequence
  Synthetic oligonucleotide
cattggcagccacccc

SEQ ID NO: 2068 - DNA, 16 bp, Artificial sequence
  Synthetic oligonucleotide
ccggcttcattggcag

SEQ ID NO: 2069 - DNA, 16 bp, Artificial sequence
  Synthetic oligonucleotide
ccagtcccggcttcat

SEQ ID NO: 2070 - DNA, 16 bp, Artificial sequence
  Synthetic oligonucleotide
actgcgcagacactgg

SEQ ID NO: 2071 - DNA, 16 bp, Artificial sequence
  Synthetic oligonucleotide
gccattcactgcgcag

SEQ ID NO: 2072 - DNA, 16 bp, Artificial sequence
  Synthetic oligonucleotide
caccccccagctggca

SEQ ID NO: 2073 - DNA, 16 bp, Artificial sequence
  Synthetic oligonucleotide
ctgcctgcagtcgccc

SEQ ID NO: 2074 - DNA, 16 bp, Artificial sequence
  Synthetic oligonucleotide
gtgcgccccctccaag

SEQ ID NO: 2075 - DNA, 16 bp, Artificial sequence
  Synthetic oligonucleotide
tggcaaagtgcgcccc

SEQ ID NO: 2076 - DNA, 16 bp, Artificial sequence
  Synthetic oligonucleotide
tctgcacggcggcctc

SEQ ID NO: 2077 - DNA, 16 bp, Artificial sequence
  Synthetic oligonucleotide
ccaccatttgtctgtg

SEQ ID NO: 2078 - DNA, 16 bp, Artificial sequence
  Synthetic oligonucleotide
gagctccgagaatgcc

SEQ ID NO: 2079 - DNA, 16 bp, Artificial sequence
  Synthetic oligonucleotide
gcctgggagctccgag

SEQ ID NO: 2080 - DNA, 16 bp, Artificial sequence
  Synthetic oligonucleotide
cccggtttttgcactt

SEQ ID NO: 2081 - DNA, 16 bp, Artificial sequence
  Synthetic oligonucleotide
ggttctcccggttttt

SEQ ID NO: 2082 - DNA, 16 bp, Artificial sequence
  Synthetic oligonucleotide
aaaagtgggttctccc

SEQ ID NO: 2083 - DNA, 16 bp, Artificial sequence
  Synthetic oligonucleotide
acaacgacctcagtgg

SEQ ID NO: 2084 - DNA, 16 bp, Artificial sequence
  Synthetic oligonucleotide
ttatactcacaacgac

SEQ ID NO: 2085 - DNA, 16 bp, Artificial sequence
  Synthetic oligonucleotide
gccgtacctcccagct

SEQ ID NO: 2086 - DNA, 16 bp, Artificial sequence
  Synthetic oligonucleotide
ccgcatacgccgtacc

SEQ ID NO: 2087 - DNA, 16 bp, Artificial sequence
  Synthetic oligonucleotide
cagtaccttccctctt

SEQ ID NO: 2088 - DNA, 16 bp, Artificial sequence
  Synthetic oligonucleotide
agttgatgtctggagg

SEQ ID NO: 2089 - DNA, 16 bp, Artificial sequence
  Synthetic oligonucleotide
ccctggagttgatgtc

SEQ ID NO: 2090 - DNA, 16 bp, Artificial sequence
  Synthetic oligonucleotide
aaactgtccaggccaa

SEQ ID NO: 2091 - DNA, 16 bp, Artificial sequence
  Synthetic oligonucleotide
tagatctccgggcttt

SEQ ID NO: 2092 - DNA, 16 bp, Artificial sequence
  Synthetic oligonucleotide
ttcttctagatctccg

SEQ ID NO: 2093 - DNA, 16 bp, Artificial sequence
  Synthetic oligonucleotide
tgagtagacgaggtgg

SEQ ID NO: 2094 - DNA, 16 bp, Artificial sequence
  Synthetic oligonucleotide
actcagcatgagtaga

SEQ ID NO: 2095 - DNA, 16 bp, Artificial sequence
  Synthetic oligonucleotide
cacatgtctggattaa

SEQ ID NO: 2096 - DNA, 16 bp, Artificial sequence
  Synthetic oligonucleotide
ctggattaagccacat

SEQ ID NO: 2097 - DNA, 16 bp, Artificial sequence
  Synthetic oligonucleotide
cgagttgatctcttct

SEQ ID NO: 2098 - DNA, 16 bp, Artificial sequence
  Synthetic oligonucleotide
caaacctcgagttgat

SEQ ID NO: 2099 - DNA, 16 bp, Artificial sequence
  Synthetic oligonucleotide
gtgatggtccacccat

SEQ ID NO: 2100 - DNA, 16 bp, Artificial sequence
  Synthetic oligonucleotide
tcagcccaggattaaa

SEQ ID NO: 2101 - DNA, 16 bp, Artificial sequence
  Synthetic oligonucleotide
ccgctttcctacccac

SEQ ID NO: 2102 - DNA, 16 bp, Artificial sequence
  Synthetic oligonucleotide
catcacccgctttcct

SEQ ID NO: 2103 - DNA, 16 bp, Artificial sequence
  Synthetic oligonucleotide
aggctttcacccacat

SEQ ID NO: 2104 - DNA, 16 bp, Artificial sequence
  Synthetic oligonucleotide
cacgcccaggctttca

SEQ ID NO: 2105 - DNA, 16 bp, Artificial sequence
  Synthetic oligonucleotide
gagcaccagtgccacg

SEQ ID NO: 2106 - DNA, 16 bp, Artificial sequence
  Synthetic oligonucleotide
gaacggcactgtgagc

SEQ ID NO: 2107 - DNA, 16 bp, Artificial sequence
  Synthetic oligonucleotide
ccaacctgcaactagg

SEQ ID NO: 2108 - DNA, 16 bp, Artificial sequence
  Synthetic oligonucleotide
ggctggtgtgcccaac

SEQ ID NO: 2109 - DNA, 16 bp, Artificial sequence
  Synthetic oligonucleotide
tggcttactggtcagg

SEQ ID NO: 2110 - DNA, 16 bp, Artificial sequence
  Synthetic oligonucleotide
gtcctagctccaacac

SEQ ID NO: 2111 - DNA, 16 bp, Artificial sequence
  Synthetic oligonucleotide
gcctcggtcctagctc

SEQ ID NO: 2112 - DNA, 16 bp, Artificial sequence
  Synthetic oligonucleotide
ccaccaagcctcggtc

SEQ ID NO: 2113 - DNA, 16 bp, Artificial sequence
  Synthetic oligonucleotide
caaggaatctactccc

SEQ ID NO: 2114 - DNA, 16 bp, Artificial sequence
  Synthetic oligonucleotide
cctatacctaaatgcc

SEQ ID NO: 2115 - DNA, 16 bp, Artificial sequence
  Synthetic oligonucleotide
accttgccctatacct

SEQ ID NO: 2116 - DNA, 16 bp, Artificial sequence
  Synthetic oligonucleotide
ccattcaagggctcct

SEQ ID NO: 2117 - DNA, 16 bp, Artificial sequence
  Synthetic oligonucleotide
aagggtgttccctttg

SEQ ID NO: 2118 - DNA, 16 bp, Artificial sequence
  Synthetic oligonucleotide
gctccctgatccatct

SEQ ID NO: 2119 - DNA, 16 bp, Artificial sequence
  Synthetic oligonucleotide
gtgccctactgggaca

SEQ ID NO: 2120 - DNA, 16 bp, Artificial sequence
  Synthetic oligonucleotide
tttatggtgccctact

SEQ ID NO: 2121 - DNA, 16 bp, Artificial sequence
  Synthetic oligonucleotide
tctctaacagtgacat

SEQ ID NO: 2122 - DNA, 16 bp, Artificial sequence
  Synthetic oligonucleotide
atatacgctcctaata

SEQ ID NO: 2123 - DNA, 16 bp, Artificial sequence
  Synthetic oligonucleotide
ccaacagatatacgct

SEQ ID NO: 2124 - DNA, 16 bp, Artificial sequence
  Synthetic oligonucleotide
catcaagacaggctca

SEQ ID NO: 2125 - DNA, 16 bp, Artificial sequence
  Synthetic oligonucleotide
ggcttggttttgccca

SEQ ID NO: 2126 - DNA, 16 bp, Artificial sequence
  Synthetic oligonucleotide
cgccccggcttggttt

SEQ ID NO: 2127 - DNA, 16 bp, Artificial sequence
  Synthetic oligonucleotide
cacgggccgccccggc

SEQ ID NO: 2128 - DNA, 16 bp, Artificial sequence
  Synthetic oligonucleotide
ttgctccccacgggcc

SEQ ID NO: 2129 - DNA, 16 bp, Artificial sequence
  Synthetic oligonucleotide
gcctcaacacaagcag

SEQ ID NO: 2130 - DNA, 16 bp, Artificial sequence
  Synthetic oligonucleotide
acatgggtcaggactg

SEQ ID NO: 2131 - DNA, 16 bp, Artificial sequence
  Synthetic oligonucleotide
agctgcacagagttca

SEQ ID NO: 2132 - DNA, 16 bp, Artificial sequence
  Synthetic oligonucleotide
ccacggttgtccccag

SEQ ID NO: 2133 - DNA, 16 bp, Artificial sequence
  Synthetic oligonucleotide
cctagtatccacggtt

SEQ ID NO: 2134 - DNA, 16 bp, Artificial sequence
  Synthetic oligonucleotide
aggacttcctagtatc

SEQ ID NO: 2135 - DNA, 16 bp, Artificial sequence
  Synthetic oligonucleotide
catagactttccctgg

SEQ ID NO: 2136 - DNA, 16 bp, Artificial sequence
  Synthetic oligonucleotide
atgtgctcgagtattc

SEQ ID NO: 2137 - DNA, 16 bp, Artificial sequence
  Synthetic oligonucleotide
ttactccttgactcag

SEQ ID NO: 2138 - DNA, 16 bp, Artificial sequence
  Synthetic oligonucleotide
atgagttggtcctgtt

SEQ ID NO: 2139 - DNA, 16 bp, Artificial sequence
  Synthetic oligonucleotide
gggtcctatgagttgg

SEQ ID NO: 2140 - DNA, 16 bp, Artificial sequence
  Synthetic oligonucleotide
tctctgacagggtcct

SEQ ID NO: 2141 - DNA, 16 bp, Artificial sequence
  Synthetic oligonucleotide
catccaggccgctgca

SEQ ID NO: 2142 - DNA, 16 bp, Artificial sequence
  Synthetic oligonucleotide
ggctcaccacagtagt

SEQ ID NO: 2143 - DNA, 16 bp, Artificial sequence
  Synthetic oligonucleotide
tcattggcagccaccc

SEQ ID NO: 2144 - DNA, 16 bp, Artificial sequence
  Synthetic oligonucleotide
cccggcttcattggca

SEQ ID NO: 2145 - DNA, 16 bp, Artificial sequence
  Synthetic oligonucleotide
gccagtcccggcttca

SEQ ID NO: 2146 - DNA, 16 bp, Artificial sequence
  Synthetic oligonucleotide
cactgcgcagacactg

SEQ ID NO: 2147 - DNA, 16 bp, Artificial sequence
  Synthetic oligonucleotide
gtgccattcactgcgc

SEQ ID NO: 2148 - DNA, 16 bp, Artificial sequence
  Synthetic oligonucleotide
ggctgacttccagatg

SEQ ID NO: 2149 - DNA, 16 bp, Artificial sequence
  Synthetic oligonucleotide
gtcgaggctgacttcc

SEQ ID NO: 2150 - DNA, 16 bp, Artificial sequence
  Synthetic oligonucleotide
cactggtcgaggctga

SEQ ID NO: 2151 - DNA, 16 bp, Artificial sequence
  Synthetic oligonucleotide
tcgaggctgacttcca

SEQ ID NO: 2152 - DNA, 16 bp, Artificial sequence
  Synthetic oligonucleotide
ggtcgaggctgacttc

SEQ ID NO: 2153 - DNA, 16 bp, Artificial sequence
  Synthetic oligonucleotide
tggtcgaggctgactt

SEQ ID NO: 2154 - DNA, 16 bp, Artificial sequence
  Synthetic oligonucleotide
ctggtcgaggctgact

SEQ ID NO: 2155 - DNA, 16 bp, Artificial sequence
  Synthetic oligonucleotide
actggtcgaggctgac

SEQ ID NO: 2156 - DNA, 16 bp, Artificial sequence
  Synthetic oligonucleotide
tctcccagcttgccac

SEQ ID NO: 2157 - DNA, 16 bp, Artificial sequence
  Synthetic oligonucleotide
gtctcccagcttgcca

SEQ ID NO: 2158 - DNA, 16 bp, Artificial sequence
  Synthetic oligonucleotide
tgtctcccagcttgcc

SEQ ID NO: 2159 - DNA, 16 bp, Artificial sequence
  Synthetic oligonucleotide
ggcggctgtgtctccc

SEQ ID NO: 2160 - DNA, 16 bp, Artificial sequence
  Synthetic oligonucleotide
tggcggctgtgtctcc

SEQ ID NO: 2161 - DNA, 16 bp, Artificial sequence
  Synthetic oligonucleotide
ctggcggctgtgtctc

SEQ ID NO: 2162 - DNA, 16 bp, Artificial sequence
  Synthetic oligonucleotide
gtctgtgaagtgtcag

SEQ ID NO: 2163 - DNA, 16 bp, Artificial sequence
  Synthetic oligonucleotide
tgtctgtgaagtgtca

SEQ ID NO: 2164 - DNA, 16 bp, Artificial sequence
  Synthetic oligonucleotide
gtgtctgtgaagtgtc

SEQ ID NO: 2165 - DNA, 16 bp, Artificial sequence
  Synthetic oligonucleotide
ggcggctgtgtctgtg

SEQ ID NO: 2166 - DNA, 16 bp, Artificial sequence
  Synthetic oligonucleotide
gtctggtagttttcag

SEQ ID NO: 2167 - DNA, 16 bp, Artificial sequence
  Synthetic oligonucleotide
aagtctggtagttttc

SEQ ID NO: 2168 - DNA, 16 bp, Artificial sequence
  Synthetic oligonucleotide
caagtctggtagtttt

SEQ ID NO: 2169 - DNA, 16 bp, Artificial sequence
  Synthetic oligonucleotide
gcaagtctggtagttt

SEQ ID NO: 2170 - DNA, 16 bp, Artificial sequence
  Synthetic oligonucleotide
aagcaagtctggtagt

SEQ ID NO: 2171 - DNA, 16 bp, Artificial sequence
  Synthetic oligonucleotide
taagcaagtctggtag

SEQ ID NO: 2172 - DNA, 16 bp, Artificial sequence
  Synthetic oligonucleotide
tgtgcaataagcaagt

SEQ ID NO: 2173 - DNA, 16 bp, Artificial sequence
  Synthetic oligonucleotide
gtgtgcaataagcaag

SEQ ID NO: 2174 - DNA, 16 bp, Artificial sequence
  Synthetic oligonucleotide
agtgtgcaataagcaa

SEQ ID NO: 2175 - DNA, 16 bp, Artificial sequence
  Synthetic oligonucleotide
cagtgtgcaataagca

SEQ ID NO: 2176 - DNA, 16 bp, Artificial sequence
  Synthetic oligonucleotide
acagtgtgcaataagc

SEQ ID NO: 2177 - DNA, 16 bp, Artificial sequence
  Synthetic oligonucleotide
caggctgcaacaagtc

SEQ ID NO: 2178 - DNA, 16 bp, Artificial sequence
  Synthetic oligonucleotide
tcaggctgcaacaagt

SEQ ID NO: 2179 - DNA, 16 bp, Artificial sequence
  Synthetic oligonucleotide
atactcaggctgcaac

SEQ ID NO: 2180 - DNA, 16 bp, Artificial sequence
  Synthetic oligonucleotide
tatactcaggctgcaa

SEQ ID NO: 2181 - DNA, 16 bp, Artificial sequence
  Synthetic oligonucleotide
ttatactcaggctgca

SEQ ID NO: 2182 - DNA, 16 bp, Artificial sequence
  Synthetic oligonucleotide
ggttatactcaggctg

SEQ ID NO: 2183 - DNA, 16 bp, Artificial sequence
  Synthetic oligonucleotide
cgggttatactcaggc

SEQ ID NO: 2184 - DNA, 16 bp, Artificial sequence
  Synthetic oligonucleotide
ccgggttatactcagg

SEQ ID NO: 2185 - DNA, 16 bp, Artificial sequence
  Synthetic oligonucleotide
cccgggttatactcag

SEQ ID NO: 2186 - DNA, 16 bp, Artificial sequence
  Synthetic oligonucleotide
ttaacttccccgggtt

SEQ ID NO: 2187 - DNA, 16 bp, Artificial sequence
  Synthetic oligonucleotide
aattaacttccccggg

SEQ ID NO: 2188 - DNA, 16 bp, Artificial sequence
  Synthetic oligonucleotide
aaattaacttccccgg

SEQ ID NO: 2189 - DNA, 16 bp, Artificial sequence
  Synthetic oligonucleotide
attccgctcaaccttc

SEQ ID NO: 2190 - DNA, 16 bp, Artificial sequence
  Synthetic oligonucleotide
aattccgctcaacctt

SEQ ID NO: 2191 - DNA, 16 bp, Artificial sequence
  Synthetic oligonucleotide
caattccgctcaacct

SEQ ID NO: 2192 - DNA, 16 bp, Artificial sequence
  Synthetic oligonucleotide
acaattccgctcaacc

SEQ ID NO: 2193 - DNA, 16 bp, Artificial sequence
  Synthetic oligonucleotide
ctacaattccgctcaa

SEQ ID NO: 2194 - DNA, 16 bp, Artificial sequence
  Synthetic oligonucleotide
aactacaattccgctc

SEQ ID NO: 2195 - DNA, 16 bp, Artificial sequence
  Synthetic oligonucleotide
caactacaattccgct

SEQ ID NO: 2196 - DNA, 16 bp, Artificial sequence
  Synthetic oligonucleotide
agcaactacaattccg

SEQ ID NO: 2197 - DNA, 16 bp, Artificial sequence
  Synthetic oligonucleotide
cccaccatagcaacta

SEQ ID NO: 2198 - DNA, 16 bp, Artificial sequence
  Synthetic oligonucleotide
aggcatactccattta

SEQ ID NO: 2199 - DNA, 16 bp, Artificial sequence
  Synthetic oligonucleotide
aaggcatactccattt

SEQ ID NO: 2200 - DNA, 16 bp, Artificial sequence
  Synthetic oligonucleotide
aaaggcatactccatt

SEQ ID NO: 2201 - DNA, 16 bp, Artificial sequence
  Synthetic oligonucleotide
tcccttgtaagcaaag

SEQ ID NO: 2202 - DNA, 16 bp, Artificial sequence
  Synthetic oligonucleotide
ttggactcagcatgag

SEQ ID NO: 2203 - DNA, 16 bp, Artificial sequence
  Synthetic oligonucleotide
cttggactcagcatga

SEQ ID NO: 2204 - DNA, 16 bp, Artificial sequence
  Synthetic oligonucleotide
tatcctcacccctacc

SEQ ID NO: 2205 - DNA, 16 bp, Artificial sequence
  Synthetic oligonucleotide
gtaaatgtatcctcac

SEQ ID NO: 2206 - DNA, 16 bp, Artificial sequence
  Synthetic oligonucleotide
ttagtgcagcttttcc

SEQ ID NO: 2207 - DNA, 16 bp, Artificial sequence
  Synthetic oligonucleotide
gagagatttagtgcag

SEQ ID NO: 2208 - DNA, 16 bp, Artificial sequence
  Synthetic oligonucleotide
aggagagatttagtgc

SEQ ID NO: 2209 - DNA, 16 bp, Artificial sequence
  Synthetic oligonucleotide
atacctgcccctgtgc

SEQ ID NO: 2210 - DNA, 16 bp, Artificial sequence
  Synthetic oligonucleotide
catacctgcccctgtg

SEQ ID NO: 2211 - DNA, 16 bp, Artificial sequence
  Synthetic oligonucleotide
tcatacctgcccctgt

SEQ ID NO: 2212 - DNA, 16 bp, Artificial sequence
  Synthetic oligonucleotide
ttcatacctgcccctg

SEQ ID NO: 2213 - DNA, 16 bp, Artificial sequence
  Synthetic oligonucleotide
atttcatacctgcccc

SEQ ID NO: 2214 - DNA, 16 bp, Artificial sequence
  Synthetic oligonucleotide
atggcatttcatacct

SEQ ID NO: 2215 - DNA, 16 bp, Artificial sequence
  Synthetic oligonucleotide
agcagggtccggacca

SEQ ID NO: 2216 - DNA, 16 bp, Artificial sequence
  Synthetic oligonucleotide
gcagcagggtccggac

SEQ ID NO: 2217 - DNA, 16 bp, Artificial sequence
  Synthetic oligonucleotide
agcagcagggtccgga

SEQ ID NO: 2218 - DNA, 16 bp, Artificial sequence
  Synthetic oligonucleotide
tagcagcagggtccgg

SEQ ID NO: 2219 - DNA, 16 bp, Artificial sequence
  Synthetic oligonucleotide
ttagcagcagggtccg

SEQ ID NO: 2220 - DNA, 16 bp, Artificial sequence
  Synthetic oligonucleotide
attagcagcagggtcc

SEQ ID NO: 2221 - DNA, 16 bp, Artificial sequence
  Synthetic oligonucleotide
cttattagcagcaggg

SEQ ID NO: 2222 - DNA, 16 bp, Artificial sequence
  Synthetic oligonucleotide
tgcttattagcagcag

SEQ ID NO: 2223 - DNA, 16 bp, Artificial sequence
  Synthetic oligonucleotide
tgcggacagtgaggct

SEQ ID NO: 2224 - DNA, 16 bp, Artificial sequence
  Synthetic oligonucleotide
atgcggacagtgaggc

SEQ ID NO: 2225 - DNA, 16 bp, Artificial sequence
  Synthetic oligonucleotide
gatgcggacagtgagg

SEQ ID NO: 2226 - DNA, 16 bp, Artificial sequence
  Synthetic oligonucleotide
tagatgcggacagtga

SEQ ID NO: 2227 - DNA, 16 bp, Artificial sequence
  Synthetic oligonucleotide
tatagatgcggacagt

SEQ ID NO: 2228 - DNA, 16 bp, Artificial sequence
  Synthetic oligonucleotide
ttatagatgcggacag

SEQ ID NO: 2229 - DNA, 16 bp, Artificial sequence
  Synthetic oligonucleotide
ctttatagatgcggac

SEQ ID NO: 2230 - DNA, 16 bp, Artificial sequence
  Synthetic oligonucleotide
tgctttatagatgcgg

SEQ ID NO: 2231 - DNA, 16 bp, Artificial sequence
  Synthetic oligonucleotide
gagccctgctttatag

SEQ ID NO: 2232 - DNA, 16 bp, Artificial sequence
  Synthetic oligonucleotide
gaggtaaatccccaaa

SEQ ID NO: 2233 - DNA, 16 bp, Artificial sequence
  Synthetic oligonucleotide
gagaggtaaatcccca

SEQ ID NO: 2234 - DNA, 16 bp, Artificial sequence
  Synthetic oligonucleotide
cagagaggtaaatccc

SEQ ID NO: 2235 - DNA, 16 bp, Artificial sequence
  Synthetic oligonucleotide
gacacatccttgacac

SEQ ID NO: 2236 - DNA, 16 bp, Artificial sequence
  Synthetic oligonucleotide
atgacacatccttgac

SEQ ID NO: 2237 - DNA, 16 bp, Artificial sequence
  Synthetic oligonucleotide
taatgacacatccttg

SEQ ID NO: 2238 - DNA, 16 bp, Artificial sequence
  Synthetic oligonucleotide
tataatgacacatcct

SEQ ID NO: 2239 - DNA, 16 bp, Artificial sequence
  Synthetic oligonucleotide
gctcctaataatacag

SEQ ID NO: 2240 - DNA, 16 bp, Artificial sequence
  Synthetic oligonucleotide
tacgctcctaataata

SEQ ID NO: 2241 - DNA, 16 bp, Artificial sequence
  Synthetic oligonucleotide
tgtagaagtgccagca

SEQ ID NO: 2242 - DNA, 16 bp, Artificial sequence
  Synthetic oligonucleotide
aataagcaagtctggt

SEQ ID NO: 2243 - DNA, 16 bp, Artificial sequence
  Synthetic oligonucleotide
gtgcgccgtcataatc

SEQ ID NO: 2244 - DNA, 16 bp, Artificial sequence
  Synthetic oligonucleotide
gcaaaggcatactcca

SEQ ID NO: 2245 - DNA, 16 bp, Artificial sequence
  Synthetic oligonucleotide
gattaaggctcagcgt

SEQ ID NO: 2246 - DNA, 16 bp, Artificial sequence
  Synthetic oligonucleotide
cccaccaagcctcggt

SEQ ID NO: 2247 - DNA, 16 bp, Artificial sequence
  Synthetic oligonucleotide
gcaataagcaagtctg

SEQ ID NO: 2248 - DNA, 16 bp, Artificial sequence
  Synthetic oligonucleotide
aagcaaaggcatactc

SEQ ID NO: 2249 - DNA, 16 bp, Artificial sequence
  Synthetic oligonucleotide
tccccaccaagcctcg

SEQ ID NO: 2250 - DNA, 16 bp, Artificial sequence
  Synthetic oligonucleotide
gtgtgtagaagtgcca

SEQ ID NO: 2251 - DNA, 16 bp, Artificial sequence
  Synthetic oligonucleotide
tgtgtgtagaagtgcc

SEQ ID NO: 2252 - DNA, 16 bp, Artificial sequence
  Synthetic oligonucleotide
actgtgtgtagaagtg

SEQ ID NO: 2253 - DNA, 16 bp, Artificial sequence
  Synthetic oligonucleotide
gactgtgtgtagaagt

SEQ ID NO: 2254 - DNA, 16 bp, Artificial sequence
  Synthetic oligonucleotide
atatcatccagcacct

SEQ ID NO: 2255 - DNA, 16 bp, Artificial sequence
  Synthetic oligonucleotide
aattcatatcatccag

SEQ ID NO: 2256 - DNA, 16 bp, Artificial sequence
  Synthetic oligonucleotide
gagcttgaattcatat

SEQ ID NO: 2257 - DNA, 16 bp, Artificial sequence
  Synthetic oligonucleotide
gatggattgatgagca

SEQ ID NO: 2258 - DNA, 16 bp, Artificial sequence
  Synthetic oligonucleotide
ggatggattgatgagc

SEQ ID NO: 2259 - DNA, 16 bp, Artificial sequence
  Synthetic oligonucleotide
ttcggcccagagaggt

SEQ ID NO: 2260 - DNA, 16 bp, Artificial sequence
  Synthetic oligonucleotide
tttcggcccagagagg

SEQ ID NO: 2261 - DNA, 16 bp, Artificial sequence
  Synthetic oligonucleotide
ttttcggcccagagag

SEQ ID NO: 2262 - DNA, 16 bp, Artificial sequence
  Synthetic oligonucleotide
cttttcggcccagaga

SEQ ID NO: 2263 - DNA, 16 bp, Artificial sequence
  Synthetic oligonucleotide
gcttttcggcccagag

SEQ ID NO: 2264 - DNA, 16 bp, Artificial sequence
  Synthetic oligonucleotide
ctgcttttcggcccag

SEQ ID NO: 2265 - DNA, 16 bp, Artificial sequence
  Synthetic oligonucleotide
actgcttttcggccca

SEQ ID NO: 2266 - DNA, 16 bp, Artificial sequence
  Synthetic oligonucleotide
aactgcttttcggccc

SEQ ID NO: 2267 - DNA, 16 bp, Artificial sequence
  Synthetic oligonucleotide
gaactgcttttcggcc

SEQ ID NO: 2268 - DNA, 16 bp, Artificial sequence
  Synthetic oligonucleotide
ggaactgcttttcggc

SEQ ID NO: 2269 - DNA, 16 bp, Artificial sequence
  Synthetic oligonucleotide
tactgtggtgtgcaga

SEQ ID NO: 2270 - DNA, 16 bp, Artificial sequence
  Synthetic oligonucleotide
atactgtggtgtgcag

SEQ ID NO: 2271 - DNA, 16 bp, Artificial sequence
  Synthetic oligonucleotide
catactgtggtgtgca

SEQ ID NO: 2272 - DNA, 16 bp, Artificial sequence
  Synthetic oligonucleotide
aagacatactgtggtg

SEQ ID NO: 2273 - DNA, 16 bp, Artificial sequence
  Synthetic oligonucleotide
ggcaatacccaagaca

SEQ ID NO: 2274 - DNA, 16 bp, Artificial sequence
  Synthetic oligonucleotide
cgacaccgtgtcgggg

SEQ ID NO: 2275 - DNA, 16 bp, Artificial sequence
  Synthetic oligonucleotide
ttcatatcatccagca

SEQ ID NO: 2276 - DNA, 16 bp, Artificial sequence
  Synthetic oligonucleotide
gaacttggttcagggc

SEQ ID NO: 2277 - DNA, 16 bp, Artificial sequence
  Synthetic oligonucleotide
cggttgtccccagctc

SEQ ID NO: 2278 - DNA, 16 bp, Artificial sequence
  Synthetic oligonucleotide
tcatagactttccctg

SEQ ID NO: 2279 - DNA, 16 bp, Artificial sequence
  Synthetic oligonucleotide
ctctagtatctttatt

SEQ ID NO: 2280 - DNA, 16 bp, Artificial sequence
  Synthetic oligonucleotide
tgaattcatatcatcc

SEQ ID NO: 2281 - DNA, 16 bp, Artificial sequence
  Synthetic oligonucleotide
atgaacttggttcagg

SEQ ID NO: 2282 - DNA, 16 bp, Artificial sequence
  Synthetic oligonucleotide
aaacttgtaacagtgg

SEQ ID NO: 2283 - DNA, 16 bp, Artificial sequence
  Synthetic oligonucleotide
attcatagactttccc

SEQ ID NO: 2284 - DNA, 16 bp, Artificial sequence
  Synthetic oligonucleotide
ttctctagtatcttta

SEQ ID NO: 2285 - DNA, 16 bp, Artificial sequence
  Synthetic oligonucleotide
gctcatgtgtatccct

SEQ ID NO: 2286 - DNA, 1824 bp, Mus musculus
ctgcatcttacccctgacttccttccagcacattcctgcagtccctctgccttccgtccatctgtccgctctgcctcccacacctagcaccccagcccgctgctgccccggtgagaacccccagcttgggccttgtcatggtgccagcaggtggccctgagcttctgacaggggcctgcctatagacctgcaggcctgaggcctcagactcacactcaaggggcaagaggccctggtggcccacctaagagccacctctgtccccagccctgctggccccactgatgtctgactgagacccagcagtgaccctgagctgcctgcccactgcctcctcctggtccctgaggttggctctgccgaggacggacgactcttctgacagcaggcggctaacggaagcagccccaagcctccaccgcagcatgggcagtgccagcccaggcctgagcaacgtgtcccccggttgcctgctactgttcccagatgtggcaccacgaacagggacggagaaggcagcatcaggagcaatgggccctgagaagcaggaatggagtcctagtccacccgccacccctgagcagggcctgtctgctttctacctctcttactttaacatgtatcccgacgatagcagctgggtcgccaaagtccccgaggcccgtgccggggaggaccacccggaggagcccgagcagtgtcccgtcattgacagccaggcctctgggagcacgttggatgagcactcgctagagcaggtgcaatcgatggttgtgggcgaggtcctgaaagatattgagacggcctgcaagcttctgaacatcacagcagaccctggggactggagccctggtaacgtgcagaagtggcttttatggacagaacaccagtaccggctgcctccagcaggcaaggccttccaggagctgggcggtaaggagctgtgcgccatgtccgaggaacagttccgtcagcgtgcacccttgggtggggatgtactgcatgcccacctggacatctggaagtcagcggcctggatgaaggagaggacctcgcctgggacccttcactactgcgcctccaccagcgaggagggctggacggatggtgaggtggactcgtcgtgctccgggcagcccattcacctgtggcagttcctgaaagaactgctgctcaagccccacagctatggccgcttcatccgctggctcaacaaggagaaaggcatcttcaaaattgaggactcagcacaggtggcccgactgtggggtgtgcgcaagaaccggccagccatgaactatgataaactaagccgctccatccgccagtattacaagaagggcatcattcgtaaacccgacatctctcagcgccttgtctaccaatttgtgcatccagtctgagagccacagagaccagaggcctacaacctgccccaggcagccactctctggttggcctggtcctctctgctcactctgaattcaggggctgctggtatcccagaacccaaggtcccagatagacagccactgatctagggatacacatgagctctctgggtcatacacaggccccaggaagatcgagggagctaggattgttcacaaacggaaccgggcttggactgtggaattcctgggggaaccacctacagcacacagggactggaccaagtcagctcaccggacagtgatgtcactggtctctgctcctgccacaatcctgtaccatatctggcatggtgctaagagatgtctgtaccctgcgttgggaagccaggggtgccctggggatggataataaagacgtaagataactgtt

SEQ ID NO: 2287 - DNA, 16 bp, Artificial sequence
  Synthetic oligonucleotide
ggctactacgccgtca

SEQ ID NO: 2288 - DNA, 23 bp, Artificial sequence
  Primer
gcgaggtcctgaaagatattgag

SEQ ID NO: 2289 - DNA, 20 bp, Artificial sequence
  Primer
gccacttctgcacgttacca

SEQ ID NO: 2290 - DNA, 27 bp, Artificial sequence
  Probe
cttctgaacatcacagcagaccctggg

SEQ ID NO: 2291 - DNA, 24 bp, Artificial sequence
  Primer
tgactccatatcctcatccacaag

SEQ ID NO: 2292 - DNA, 20 bp, Artificial sequence
  Primer
aggtgtaaggcgctcatgct

SEQ ID NO: 2293 - DNA, 30 bp, Artificial sequence
  Probe
caccttcatcccacctatcactgtcttccc

SEQ ID NO: 2294 - DNA, 20 bp, Artificial sequence
  Primer
tcacgtgccctgataaccaa

SEQ ID NO: 2295 - DNA, 25 bp, Artificial sequence
  Primer
tgctatcatccctgtagcagtagtg

SEQ ID NO: 2296 - DNA, 19 bp, Artificial sequence
  Probe
ccagccttgtggcccatcc

SEQ ID NO: 2297 - DNA, 20 bp, Artificial sequence
  Primer
tggattcccgttcgagtacg

SEQ ID NO: 2298 - DNA, 19 bp, Artificial sequence
  Primer
tcagctggatagcgacatc

SEQ ID NO: 2299 - DNA, 20 bp, Artificial sequence
  Probe
aagcgagggctccgacccga

SEQ ID NO: 2300 - DNA, 22 bp, Artificial sequence
  Primer
tgcctctagcacacaactgtga

SEQ ID NO: 2301 - DNA, 22 bp, Artificial sequence
  Primer
gcaggaatgatttggaaaggaa

SEQ ID NO: 2302 - DNA, 23 bp, Artificial sequence
  Probe
cgttttgtggatcagcgcctcca

SEQ ID NO: 2303 - DNA, 21 bp, Artificial sequence
  Primer
tcatggaaagcctctgtggat

SEQ ID NO: 2304 - DNA, 16 bp, Artificial sequence
  Primer
gcggcccgtgatgaga

SEQ ID NO: 2305 - DNA, 24 bp, Artificial sequence
  Probe
cccacaagtcccagaaccgcagtg

SEQ ID NO: 2306 - DNA, 19 bp, Artificial sequence
  Primer
tggtgcctgacccatctca

SEQ ID NO: 2307 - DNA, 28 bp, Artificial sequence
  Primer
gtttcttgcttaaagtcatccttttctt

SEQ ID NO: 2308 - DNA, 26 bp, Artificial sequence
  Probe
aagcagaatctccttgcgccacagaa

SEQ ID NO: 2309 - DNA, 21 bp, Artificial sequence
  Primer
gctcagggtaaggtccgattc

SEQ ID NO: 2310 - DNA, 15 bp, Artificial sequence
  Primer
gccccccaccccaaa

SEQ ID NO: 2311 - DNA, 31 bp, Artificial sequence
  Probe
tcataatcaaagaagcagcaagcacttcctg

SEQ ID NO: 2312 - DNA, 25 bp, Artificial sequence
  Primer
tgagcctaacacgtcgattatatca

SEQ ID NO: 2313 - DNA, 24 bp, Artificial sequence
  Primer
tctggaacactctctcctcaggtt

SEQ ID NO: 2314 - DNA, 26 bp, Artificial sequence
  Probe
cagcgacagagccagaataacagccg

SEQ ID NO: 2315 - DNA, 22 bp, Artificial sequence
  Primer
cactaaggtggcctacctccaa

SEQ ID NO: 2316 - DNA, 23 bp, Artificial sequence
  Primer
agctcgcttgaatgctgtatttc

SEQ ID NO: 2317 - DNA, 22 bp, Artificial sequence
  Probe
cccaggcacggctaaggttggc

SEQ ID NO: 2318 - DNA, 15 bp, Artificial sequence
  Primer
tcgccgcttgctgca

SEQ ID NO: 2319 - DNA, 17 bp, Artificial sequence
  Primer
atcggccgtgatgtcga

SEQ ID NO: 2320 - DNA, 23 bp, Artificial sequence
  Probe
ccatggtcaaccccaccgtgttc

SEQ ID NO: 2321 - DNA, 20 bp, Artificial sequence
  Primer
cacctggacatctggaagtc

SEQ ID NO: 2322 - DNA, 19 bp, Artificial sequence
  Primer
ccttgaggaactgccacag

SEQ ID NO: 2323 - DNA, 22 bp, Artificial sequence
  Probe
agtgaggagagctggaccgaca

SEQ ID NO: 2324 - RNA, 23 nt, Artificial sequence
  Synthetic oligonucleotide
gcaggaaugugcugggaggaagu

SEQ ID NO: 2325 - RNA, 23 nt, Artificial sequence
  Synthetic oligonucleotide
agggagcuggcagcaggcuugga

SEQ ID NO: 2326 - RNA, 23 nt, Artificial sequence
  Synthetic oligonucleotide
caguguggacacggcagagugca

SEQ ID NO: 2327 - RNA, 23 nt, Artificial sequence
  Synthetic oligonucleotide
agucagacagccgcgagaugaag

SEQ ID NO: 2328 - RNA, 23 nt, Artificial sequence
  Synthetic oligonucleotide
ggaggacugggucuguggggcag

SEQ ID NO: 2329 - RNA, 23 nt, Artificial sequence
  Synthetic oligonucleotide
gcccaaccugaggggcuugcagg

SEQ ID NO: 2330 - RNA, 23 nt, Artificial sequence
  Synthetic oligonucleotide
ccugcuggcaccguggcaaggcc

SEQ ID NO: 2331 - RNA, 23 nt, Artificial sequence
  Synthetic oligonucleotide
cccucugaggucucagggcugcg

SEQ ID NO: 2332 - RNA, 23 nt, Artificial sequence
  Synthetic oligonucleotide
gcgugccuguagggaguccccua

SEQ ID NO: 2333 - RNA, 23 nt, Artificial sequence
  Synthetic oligonucleotide
cagguuggccacugggggccugg

SEQ ID NO: 2334 - RNA, 23 nt, Artificial sequence
  Synthetic oligonucleotide
cuacccccagcccagggcugccu

SEQ ID NO: 2335 - RNA, 23 nt, Artificial sequence
  Synthetic oligonucleotide
cugguggcagaggcagcacucag

SEQ ID NO: 2336 - RNA, 23 nt, Artificial sequence
  Synthetic oligonucleotide
gugccaacuucaggggccgggaa

SEQ ID NO: 2337 - RNA, 23 nt, Artificial sequence
  Synthetic oligonucleotide
gaagaggugugggcagcugaggc

SEQ ID NO: 2338 - RNA, 23 nt, Artificial sequence
  Synthetic oligonucleotide
caggcaucuggggggccagcgga

SEQ ID NO: 2339 - RNA, 23 nt, Artificial sequence
  Synthetic oligonucleotide
ggccacuggcgugucucagccag

SEQ ID NO: 2340 - RNA, 23 nt, Artificial sequence
  Synthetic oligonucleotide
ggaaccaggggccagcagggcug

SEQ ID NO: 2341 - RNA, 23 nt, Artificial sequence
  Synthetic oligonucleotide
ccagggagcugucugcugcagug

SEQ ID NO: 2342 - RNA, 23 nt, Artificial sequence
  Synthetic oligonucleotide
agcaggagguggcugggggauac

SEQ ID NO: 2343 - RNA, 23 nt, Artificial sequence
  Synthetic oligonucleotide
uacgcugcucagacccgggcugg

SEQ ID NO: 2344 - RNA, 23 nt, Artificial sequence
  Synthetic oligonucleotide
gucuguuagcugccuggugccca

SEQ ID NO: 2345 - RNA, 23 nt, Artificial sequence
  Synthetic oligonucleotide
cuguuugggcuggcggcuguguc

SEQ ID NO: 2346 - RNA, 23 nt, Artificial sequence
  Synthetic oligonucleotide
uggcgcugcccaugccgcugcug

SEQ ID NO: 2347 - RNA, 23 nt, Artificial sequence
  Synthetic oligonucleotide
gcgacaccgugucggggggcagc

SEQ ID NO: 2348 - RNA, 23 nt, Artificial sequence
  Synthetic oligonucleotide
aaggcggacaggcccugcucggg

SEQ ID NO: 2349 - RNA, 23 nt, Artificial sequence
  Synthetic oligonucleotide
gggcguggcggguggacugggac

SEQ ID NO: 2350 - RNA, 23 nt, Artificial sequence
  Synthetic oligonucleotide
agacccacugcccccgcugccgc

SEQ ID NO: 2351 - RNA, 23 nt, Artificial sequence
  Synthetic oligonucleotide
gacuccagucccgucucucgaga

SEQ ID NO: 2352 - RNA, 23 nt, Artificial sequence
  Synthetic oligonucleotide
cgccuucuccaagccuguccgcg

SEQ ID NO: 2353 - RNA, 23 nt, Artificial sequence
  Synthetic oligonucleotide
ugucaaaguaggagagguagaag

SEQ ID NO: 2354 - RNA, 23 nt, Artificial sequence
  Synthetic oligonucleotide
cugucaaugaccgggcacugcuc

SEQ ID NO: 2355 - RNA, 23 nt, Artificial sequence
  Synthetic oligonucleotide
cucaggcuccucagguggcuccu

SEQ ID NO: 2356 - RNA, 23 nt, Artificial sequence
  Synthetic oligonucleotide
ccucccgacugcuggccccaggg

SEQ ID NO: 2357 - RNA, 23 nt, Artificial sequence
  Synthetic oligonucleotide
ggggccuuggcugcccagcugcu

SEQ ID NO: 2358 - RNA, 23 nt, Artificial sequence
  Synthetic oligonucleotide
gcuguccucaggguacagcaugu

SEQ ID NO: 2359 - RNA, 23 nt, Artificial sequence
  Synthetic oligonucleotide
cccgccgggcaccaaguccaggc

SEQ ID NO: 2360 - RNA, 23 nt, Artificial sequence
  Synthetic oligonucleotide
gagcacuucgcccaccaccaugg

SEQ ID NO: 2361 - RNA, 23 nt, Artificial sequence
  Synthetic oligonucleotide
uggacugcaccugcuccagcgag

SEQ ID NO: 2362 - RNA, 23 nt, Artificial sequence
  Synthetic oligonucleotide
gagugcuccuccaaggucagccc

SEQ ID NO: 2363 - RNA, 23 nt, Artificial sequence
  Synthetic oligonucleotide
ggcugcccgcuggggcuuggcug

SEQ ID NO: 2364 - RNA, 23 nt, Artificial sequence
  Synthetic oligonucleotide
caggccgucucgauguccuugag

SEQ ID NO: 2365 - RNA, 23 nt, Artificial sequence
  Synthetic oligonucleotide
cggugauguugagcagcuugcag

SEQ ID NO: 2366 - RNA, 23 nt, Artificial sequence
  Synthetic oligonucleotide
agcuccuggaaggccuugcccau

SEQ ID NO: 2367 - RNA, 23 nt, Artificial sequence
  Synthetic oligonucleotide
cacuucugcacauugcuggggcu

SEQ ID NO: 2368 - RNA, 23 nt, Artificial sequence
  Synthetic oligonucleotide
cauggggggcagccgguauuggu

SEQ ID NO: 2369 - RNA, 23 nt, Artificial sequence
  Synthetic oligonucleotide
ggugcucuguccacaggagccac

SEQ ID NO: 2370 - RNA, 23 nt, Artificial sequence
  Synthetic oligonucleotide
gcuccaguccaugggaucugcgg

SEQ ID NO: 2371 - RNA, 23 nt, Artificial sequence
  Synthetic oligonucleotide
cgcacagcuccuugcccgccagc

SEQ ID NO: 2372 - RNA, 23 nt, Artificial sequence
  Synthetic oligonucleotide
gaacugcuccuccgacauggcgc

SEQ ID NO: 2373 - RNA, 23 nt, Artificial sequence
  Synthetic oligonucleotide
cccaggggcgagcgcuggcggaa

SEQ ID NO: 2374 - RNA, 23 nt, Artificial sequence
  Synthetic oligonucleotide
ugacuuccagauguccagguggg

SEQ ID NO: 2375 - RNA, 23 nt, Artificial sequence
  Synthetic oligonucleotide
gggcgugcagcacauccccaccc

SEQ ID NO: 2376 - RNA, 23 nt, Artificial sequence
  Synthetic oligonucleotide
cgcucuuucauccaggccgcuga

SEQ ID NO: 2377 - RNA, 23 nt, Artificial sequence
  Synthetic oligonucleotide
cugucgguccagcucuccucacu

SEQ ID NO: 2378 - RNA, 23 nt, Artificial sequence
  Synthetic oligonucleotide
acuggucgaggcacaguagugaa

SEQ ID NO: 2379 - RNA, 23 nt, Artificial sequence
  Synthetic oligonucleotide
agcaugaugaguccaccucgcug

SEQ ID NO: 2380 - RNA, 23 nt, Artificial sequence
  Synthetic oligonucleotide
gaaucgccccaggugaaguccgc

SEQ ID NO: 2381 - RNA, 23 nt, Artificial sequence
  Synthetic oligonucleotide
cagguggaugggcugcccggagc

SEQ ID NO: 2382 - RNA, 23 nt, Artificial sequence
  Synthetic oligonucleotide
agcuguggggcuugaguagcaac

SEQ ID NO: 2383 - RNA, 23 nt, Artificial sequence
  Synthetic oligonucleotide
augcccuucuccuuguugagcca

SEQ ID NO: 2384 - RNA, 23 nt, Artificial sequence
  Synthetic oligonucleotide
ggacgguucuugcggaugcccca

SEQ ID NO: 2385 - RNA, 23 nt, Artificial sequence
  Synthetic oligonucleotide
ccacagccgggccaccugggcug

SEQ ID NO: 2386 - RNA, 23 nt, Artificial sequence
  Synthetic oligonucleotide
cugaguccucaauuuugaagaug

SEQ ID NO: 2387 - RNA, 23 nt, Artificial sequence
  Synthetic oligonucleotide
aacuccuugaggaacugccacag

SEQ ID NO: 2388 - RNA, 23 nt, Artificial sequence
  Synthetic oligonucleotide
ccaccuaaugaagcggccauagc

SEQ ID NO: 2389 - RNA, 23 nt, Artificial sequence
  Synthetic oligonucleotide
cuggcggauggagcggcucagcu

SEQ ID NO: 2390 - RNA, 23 nt, Artificial sequence
  Synthetic oligonucleotide
augaugcccuucuuguaauacug

SEQ ID NO: 2391 - RNA, 23 nt, Artificial sequence
  Synthetic oligonucleotide
ggagagaggccccugagggcggg

SEQ ID NO: 2392 - RNA, 23 nt, Artificial sequence
  Synthetic oligonucleotide
gaacugguagacgaggcgcuggg

SEQ ID NO: 2393 - RNA, 23 nt, Artificial sequence
  Synthetic oligonucleotide
gggagaugucuggcuuccggaug

SEQ ID NO: 2394 - RNA, 23 nt, Artificial sequence
  Synthetic oligonucleotide
gcuugucguaguucauggcggga

SEQ ID NO: 2395 - RNA, 23 nt, Artificial sequence
  Synthetic oligonucleotide
ggguuucaggcccugggccaggc

SEQ ID NO: 2396 - RNA, 23 nt, Artificial sequence
  Synthetic oligonucleotide
uugggcucuggaaggucagagca

SEQ ID NO: 2397 - RNA, 23 nt, Artificial sequence
  Synthetic oligonucleotide
gcagcagagcagacugcccguuu

SEQ ID NO: 2398 - RNA, 23 nt, Artificial sequence
  Synthetic oligonucleotide
uggcugaggcagggcaggcagga

SEQ ID NO: 2399 - RNA, 23 nt, Artificial sequence
  Synthetic oligonucleotide
uuuucccccaucucagggccugg

SEQ ID NO: 2400 - RNA, 23 nt, Artificial sequence
  Synthetic oligonucleotide
ggcacucagauggggugcacgaa

SEQ ID NO: 2401 - RNA, 23 nt, Artificial sequence
  Synthetic oligonucleotide
uugguugccccucccugaccuug

SEQ ID NO: 2402 - RNA, 23 nt, Artificial sequence
  Synthetic oligonucleotide
gucucccucuguccuccagggga

SEQ ID NO: 2403 - RNA, 23 nt, Artificial sequence
  Synthetic oligonucleotide
ggagcagcugggccugaggagga

SEQ ID NO: 2404 - RNA, 23 nt, Artificial sequence
  Synthetic oligonucleotide
ggaagcaccccugccccaggguc

SEQ ID NO: 2405 - RNA, 23 nt, Artificial sequence
  Synthetic oligonucleotide
cccauaucccccuggggcaguug

SEQ ID NO: 2406 - RNA, 23 nt, Artificial sequence
  Synthetic oligonucleotide
gucccgaaggccccagaggaccc

SEQ ID NO: 2407 - RNA, 23 nt, Artificial sequence
  Synthetic oligonucleotide
agguguuggggagcagcccuguc

SEQ ID NO: 2408 - RNA, 23 nt, Artificial sequence
  Synthetic oligonucleotide
ggcagggggauggagcagagaga

SEQ ID NO: 2409 - RNA, 23 nt, Artificial sequence
  Synthetic oligonucleotide
gccuuugucgagucacugcccuu

SEQ ID NO: 2410 - RNA, 23 nt, Artificial sequence
  Synthetic oligonucleotide
agaggccuggacugccuguggcc

SEQ ID NO: 2411 - RNA, 23 nt, Artificial sequence
  Synthetic oligonucleotide
cuucuguaggcucugcucuggaa

SEQ ID NO: 2412 - RNA, 23 nt, Artificial sequence
  Synthetic oligonucleotide
gaaaugcuggggucagaggcagg

SEQ ID NO: 2413 - RNA, 23 nt, Artificial sequence
  Synthetic oligonucleotide
augucucccugcaccaugccagg

SEQ ID NO: 2414 - RNA, 23 nt, Artificial sequence
  Synthetic oligonucleotide
ucuaguaucuuuauuauccauuc

SEQ ID NO: 2415 - RNA, 23 nt, Artificial sequence
  Synthetic oligonucleotide
ugcccaacucaggggugcagaug

SEQ ID NO: 2416 - RNA, 23 nt, Artificial sequence
  Synthetic oligonucleotide
uucccgggggcacuccuggcugc

SEQ ID NO: 2417 - RNA, 23 nt, Artificial sequence
  Synthetic oligonucleotide
agguguggugcagaaugggaggc

SEQ ID NO: 2418 - RNA, 23 nt, Artificial sequence
  Synthetic oligonucleotide
gcccuucuuguaauacuggcgga

SEQ ID NO: 2419 - RNA, 23 nt, Artificial sequence
  Synthetic oligonucleotide
uccaggccgcugacuuccagaug

SEQ ID NO: 2420 - RNA, 23 nt, Artificial sequence
  Synthetic oligonucleotide
aagcggccauagcuguggggcuu

SEQ ID NO: 2421 - RNA, 23 nt, Artificial sequence
  Synthetic oligonucleotide
ucuuguaauacuggcggauggag

SEQ ID NO: 2422 - RNA, 23 nt, Artificial sequence
  Synthetic oligonucleotide
gcugggaggaagucagacagccg

SEQ ID NO: 2423 - RNA, 23 nt, Artificial sequence
  Synthetic oligonucleotide
aggggcuugcagggagcuggcag

SEQ ID NO: 2424 - RNA, 23 nt, Artificial sequence
  Synthetic oligonucleotide
gucuguggggcaguguggacacg

SEQ ID NO: 2425 - RNA, 23 nt, Artificial sequence
  Synthetic oligonucleotide
cagcaggcuuggaggacuggguc

SEQ ID NO: 2426 - RNA, 23 nt, Artificial sequence
  Synthetic oligonucleotide
ccguggcaaggcccaaccugagg

SEQ ID NO: 2427 - RNA, 23 nt, Artificial sequence
  Synthetic oligonucleotide
acggcagagugcaggaaugugcu

SEQ ID NO: 2428 - RNA, 23 nt, Artificial sequence
  Synthetic oligonucleotide
cccagggcugccugcuggcaccg

SEQ ID NO: 2429 - RNA, 23 nt, Artificial sequence
  Synthetic oligonucleotide
aggcagcacucagguuggccacu

SEQ ID NO: 2430 - RNA, 23 nt, Artificial sequence
  Synthetic oligonucleotide
caagggguggcccucugaggucu

SEQ ID NO: 2431 - RNA, 23 nt, Artificial sequence
  Synthetic oligonucleotide
ucucagggcugcgugccuguagg

SEQ ID NO: 2432 - RNA, 23 nt, Artificial sequence
  Synthetic oligonucleotide
agggaguccccuacccccagccc

SEQ ID NO: 2433 - RNA, 23 nt, Artificial sequence
  Synthetic oligonucleotide
gccagcagggcugguggcagagg

SEQ ID NO: 2434 - RNA, 23 nt, Artificial sequence
  Synthetic oligonucleotide
gucugcugcagugccaacuucag

SEQ ID NO: 2435 - RNA, 23 nt, Artificial sequence
  Synthetic oligonucleotide
gggcagcugaggccacuggcgug

SEQ ID NO: 2436 - RNA, 23 nt, Artificial sequence
  Synthetic oligonucleotide
gugucucagccaggcaucugggg

SEQ ID NO: 2437 - RNA, 23 nt, Artificial sequence
  Synthetic oligonucleotide
gggggccagcggaaccaggggcc

SEQ ID NO: 2438 - RNA, 23 nt, Artificial sequence
  Synthetic oligonucleotide
caggggccgggaagagguguggg

SEQ ID NO: 2439 - RNA, 23 nt, Artificial sequence
  Synthetic oligonucleotide
ugccuggugcccagggagcuguc

SEQ ID NO: 2440 - RNA, 23 nt, Artificial sequence
  Synthetic oligonucleotide
ggcugggggauacgcugcucaga

SEQ ID NO: 2441 - RNA, 23 nt, Artificial sequence
  Synthetic oligonucleotide
agacccgggcuggcgcugcccau

SEQ ID NO: 2442 - RNA, 23 nt, Artificial sequence
  Synthetic oligonucleotide
caugccgcugcuguuugggcugg

SEQ ID NO: 2443 - RNA, 23 nt, Artificial sequence
  Synthetic oligonucleotide
uggcggcugugucuguuagcugc

SEQ ID NO: 2444 - RNA, 23 nt, Artificial sequence
  Synthetic oligonucleotide
gucggggggcagcaggagguggc

SEQ ID NO: 2445 - RNA, 23 nt, Artificial sequence
  Synthetic oligonucleotide
aagccuguccgcgacaccguguc

SEQ ID NO: 2446 - RNA, 23 nt, Artificial sequence
  Synthetic oligonucleotide
ggcccugcucgggcguggcgggu

SEQ ID NO: 2447 - RNA, 23 nt, Artificial sequence
  Synthetic oligonucleotide
gguggacugggacuccagucccg

SEQ ID NO: 2448 - RNA, 23 nt, Artificial sequence
  Synthetic oligonucleotide
ccgucucucgagacccacugccc

SEQ ID NO: 2449 - RNA, 23 nt, Artificial sequence
  Synthetic oligonucleotide
cccccgcugccgccuucuccaag

SEQ ID NO: 2450 - RNA, 23 nt, Artificial sequence
  Synthetic oligonucleotide
cugcccagcugcuguccucaggg

SEQ ID NO: 2451 - RNA, 23 nt, Artificial sequence
  Synthetic oligonucleotide
ccgggcacugcucaggcuccuca

SEQ ID NO: 2452 - RNA, 23 nt, Artificial sequence
  Synthetic oligonucleotide
uggggcuuggcugucaaugaccg

SEQ ID NO: 2453 - RNA, 23 nt, Artificial sequence
  Synthetic oligonucleotide
ucagguggcuccucccgacugcu

SEQ ID NO: 2454 - RNA, 23 nt, Artificial sequence
  Synthetic oligonucleotide
gcuggccccaggggccuuggcug

SEQ ID NO: 2455 - RNA, 23 nt, Artificial sequence
  Synthetic oligonucleotide
ggguacagcaugucaaaguagga

SEQ ID NO: 2456 - RNA, 23 nt, Artificial sequence
  Synthetic oligonucleotide
ccaaggucagcccgccgggcacc

SEQ ID NO: 2457 - RNA, 23 nt, Artificial sequence
  Synthetic oligonucleotide
cugcuccagcgagugcuccucca

SEQ ID NO: 2458 - RNA, 23 nt, Artificial sequence
  Synthetic oligonucleotide
accaaguccaggcugcccgcugg

SEQ ID NO: 2459 - RNA, 23 nt, Artificial sequence
  Synthetic oligonucleotide
cgauguccuugagcacuucgccc

SEQ ID NO: 2460 - RNA, 23 nt, Artificial sequence
  Synthetic oligonucleotide
gagcagcuugcaggccgucucga

SEQ ID NO: 2461 - RNA, 23 nt, Artificial sequence
  Synthetic oligonucleotide
cccaccaccauggacugcaccug

SEQ ID NO: 2462 - RNA, 23 nt, Artificial sequence
  Synthetic oligonucleotide
augggaucugcggugauguugag

SEQ ID NO: 2463 - RNA, 23 nt, Artificial sequence
  Synthetic oligonucleotide
ccacaggagccacuucugcacau

SEQ ID NO: 2464 - RNA, 23 nt, Artificial sequence
  Synthetic oligonucleotide
cauugcuggggcuccaguccaug

SEQ ID NO: 2465 - RNA, 23 nt, Artificial sequence
  Synthetic oligonucleotide
cuugcccgccagcuccuggaagg

SEQ ID NO: 2466 - RNA, 23 nt, Artificial sequence
  Synthetic oligonucleotide
aggccuugcccauggggggcagc

SEQ ID NO: 2467 - RNA, 23 nt, Artificial sequence
  Synthetic oligonucleotide
agccgguauuggugcucugucca

SEQ ID NO: 2468 - RNA, 23 nt, Artificial sequence
  Synthetic oligonucleotide
cacauccccacccaggggcgagc

SEQ ID NO: 2469 - RNA, 23 nt, Artificial sequence
  Synthetic oligonucleotide
auguccaggugggcgugcagcac

SEQ ID NO: 2470 - RNA, 23 nt, Artificial sequence
  Synthetic oligonucleotide
agcgcuggcggaacugcuccucc

SEQ ID NO: 2471 - RNA, 23 nt, Artificial sequence
  Synthetic oligonucleotide
uccgacauggcgcacagcuccuu

SEQ ID NO: 2472 - RNA, 23 nt, Artificial sequence
  Synthetic oligonucleotide
aggugaaguccgcucuuucaucc

SEQ ID NO: 2473 - RNA, 23 nt, Artificial sequence
  Synthetic oligonucleotide
gcacaguagugaaucgccccagg

SEQ ID NO: 2474 - RNA, 23 nt, Artificial sequence
  Synthetic oligonucleotide
ggaacugccacagguggaugggc

SEQ ID NO: 2475 - RNA, 23 nt, Artificial sequence
  Synthetic oligonucleotide
cuugaguagcaacuccuugagga

SEQ ID NO: 2476 - RNA, 23 nt, Artificial sequence
  Synthetic oligonucleotide
guccaccucgcugucgguccagc

SEQ ID NO: 2477 - RNA, 23 nt, Artificial sequence
  Synthetic oligonucleotide
agcucuccucacuggucgaggca

SEQ ID NO: 2478 - RNA, 23 nt, Artificial sequence
  Synthetic oligonucleotide
ggcugcccggagcaugaugaguc

SEQ ID NO: 2479 - RNA, 23 nt, Artificial sequence
  Synthetic oligonucleotide
ugcggaugccccacagccgggcc

SEQ ID NO: 2480 - RNA, 23 nt, Artificial sequence
  Synthetic oligonucleotide
guucauggcgggacgguucuugc

SEQ ID NO: 2481 - RNA, 23 nt, Artificial sequence
  Synthetic oligonucleotide
aauuuugaagaugcccuucuccu

SEQ ID NO: 2482 - RNA, 23 nt, Artificial sequence
  Synthetic oligonucleotide
gccaccugggcugaguccucaau

SEQ ID NO: 2483 - RNA, 23 nt, Artificial sequence
  Synthetic oligonucleotide
ccuuguugagccaccuaaugaag

SEQ ID NO: 2484 - RNA, 23 nt, Artificial sequence
  Synthetic oligonucleotide
uggggugcacgaacugguagacg

SEQ ID NO: 2485 - RNA, 23 nt, Artificial sequence
  Synthetic oligonucleotide
acgaggcgcugggagaugucugg

SEQ ID NO: 2486 - RNA, 23 nt, Artificial sequence
  Synthetic oligonucleotide
uggcuuccggaugaugcccuucu

SEQ ID NO: 2487 - RNA, 23 nt, Artificial sequence
  Synthetic oligonucleotide
gagcggcucagcuugucguaguu

SEQ ID NO: 2488 - RNA, 23 nt, Artificial sequence
  Synthetic oligonucleotide
cccugggccaggcacucagaugg

SEQ ID NO: 2489 - RNA, 23 nt, Artificial sequence
  Synthetic oligonucleotide
cccugagggcggguuucaggccc

SEQ ID NO: 2490 - RNA, 23 nt, Artificial sequence
  Synthetic oligonucleotide
cucccugaccuugggcucuggaa

SEQ ID NO: 2491 - RNA, 23 nt, Artificial sequence
  Synthetic oligonucleotide
gaaggucagagcagcagagcaga

SEQ ID NO: 2492 - RNA, 23 nt, Artificial sequence
  Synthetic oligonucleotide
agacugcccguuuucccccaucu

SEQ ID NO: 2493 - RNA, 23 nt, Artificial sequence
  Synthetic oligonucleotide
ucucagggccuggcugaggcagg

SEQ ID NO: 2494 - RNA, 23 nt, Artificial sequence
  Synthetic oligonucleotide
agggcaggcaggagagaggcccc

SEQ ID NO: 2495 - RNA, 23 nt, Artificial sequence
  Synthetic oligonucleotide
ggccugaggaggaagcaccccug

SEQ ID NO: 2496 - RNA, 23 nt, Artificial sequence
  Synthetic oligonucleotide
ccccagaggacccauaucccccu

SEQ ID NO: 2497 - RNA, 23 nt, Artificial sequence
  Synthetic oligonucleotide
gagcagcccugucucccucuguc

SEQ ID NO: 2498 - RNA, 23 nt, Artificial sequence
  Synthetic oligonucleotide
guccuccaggggagcagcugggc

SEQ ID NO: 2499 - RNA, 23 nt, Artificial sequence
  Synthetic oligonucleotide
ccuggggcaguugguugccccuc

SEQ ID NO: 2500 - RNA, 23 nt, Artificial sequence
  Synthetic oligonucleotide
cugccccagggucccgaaggccc

SEQ ID NO: 2501 - RNA, 23 nt, Artificial sequence
  Synthetic oligonucleotide
ggucagaggcagguguuggggag

SEQ ID NO: 2502 - RNA, 23 nt, Artificial sequence
  Synthetic oligonucleotide
cagaaugggaggcagggggaugg

SEQ ID NO: 2503 - RNA, 23 nt, Artificial sequence
  Synthetic oligonucleotide
uggagcagagagaggccuggacu

SEQ ID NO: 2504 - RNA, 23 nt, Artificial sequence
  Synthetic oligonucleotide
acugccuguggccuuugucgagu

SEQ ID NO: 2505 - RNA, 23 nt, Artificial sequence
  Synthetic oligonucleotide
agucacugcccuucuguaggcuc

SEQ ID NO: 2506 - RNA, 23 nt, Artificial sequence
  Synthetic oligonucleotide
cucugcucuggaaaugcuggggu

SEQ ID NO: 2507 - RNA, 23 nt, Artificial sequence
  Synthetic oligonucleotide
aggggugcagaugucucccugca

SEQ ID NO: 2508 - RNA, 23 nt, Artificial sequence
  Synthetic oligonucleotide
gcaccaugccagguguggugcag

SEQ ID NO: 2509 - RNA, 23 nt, Artificial sequence
  Synthetic oligonucleotide
cacuccuggcugcccaacucagg

SEQ ID NO: 2510 - RNA, 23 nt, Artificial sequence
  Synthetic oligonucleotide
uuauuauccauucccgggggcac

SEQ ID NO: 2511 - RNA, 21 nt, Artificial sequence
  Synthetic oligonucleotide
uuccucccagcacauuccugc

SEQ ID NO: 2512 - RNA, 21 nt, Artificial sequence
  Synthetic oligonucleotide
caagccugcugccagcucccu

SEQ ID NO: 2513 - RNA, 21 nt, Artificial sequence
  Synthetic oligonucleotide
cacucugccguguccacacug

SEQ ID NO: 2514 - RNA, 21 nt, Artificial sequence
  Synthetic oligonucleotide
ucaucucgcggcugucugacu

SEQ ID NO: 2515 - RNA, 21 nt, Artificial sequence
  Synthetic oligonucleotide
gccccacagacccaguccucc

SEQ ID NO: 2516 - RNA, 21 nt, Artificial sequence
  Synthetic oligonucleotide
ugcaagccccucagguugggc

SEQ ID NO: 2517 - RNA, 21 nt, Artificial sequence
  Synthetic oligonucleotide
ccuugccacggugccagcagg

SEQ ID NO: 2518 - RNA, 21 nt, Artificial sequence
  Synthetic oligonucleotide
cagcccugagaccucagaggg

SEQ ID NO: 2519 - RNA, 21 nt, Artificial sequence
  Synthetic oligonucleotide
ggggacucccuacaggcacgc

SEQ ID NO: 2520 - RNA, 21 nt, Artificial sequence
  Synthetic oligonucleotide
aggcccccaguggccaaccug

SEQ ID NO: 2521 - RNA, 21 nt, Artificial sequence
  Synthetic oligonucleotide
gcagcccugggcuggggguag

SEQ ID NO: 2522 - RNA, 21 nt, Artificial sequence
  Synthetic oligonucleotide
gagugcugccucugccaccag

SEQ ID NO: 2523 - RNA, 21 nt, Artificial sequence
  Synthetic oligonucleotide
cccggccccugaaguuggcac

SEQ ID NO: 2524 - RNA, 21 nt, Artificial sequence
  Synthetic oligonucleotide
cucagcugcccacaccucuuc

SEQ ID NO: 2525 - RNA, 21 nt, Artificial sequence
  Synthetic oligonucleotide
cgcuggccccccagaugccug

SEQ ID NO: 2526 - RNA, 21 nt, Artificial sequence
  Synthetic oligonucleotide
ggcugagacacgccaguggcc

SEQ ID NO: 2527 - RNA, 21 nt, Artificial sequence
  Synthetic oligonucleotide
gcccugcuggccccugguucc

SEQ ID NO: 2528 - RNA, 21 nt, Artificial sequence
  Synthetic oligonucleotide
cugcagcagacagcucccugg

SEQ ID NO: 2529 - RNA, 21 nt, Artificial sequence
  Synthetic oligonucleotide
aucccccagccaccuccugcu

SEQ ID NO: 2530 - RNA, 21 nt, Artificial sequence
  Synthetic oligonucleotide
agcccgggucugagcagcgua

SEQ ID NO: 2531 - RNA, 21 nt, Artificial sequence
  Synthetic oligonucleotide
ggcaccaggcagcuaacagac

SEQ ID NO: 2532 - RNA, 21 nt, Artificial sequence
  Synthetic oligonucleotide
cacagccgccagcccaaacag

SEQ ID NO: 2533 - RNA, 21 nt, Artificial sequence
  Synthetic oligonucleotide
gcagcggcaugggcagcgcca

SEQ ID NO: 2534 - RNA, 21 nt, Artificial sequence
  Synthetic oligonucleotide
ugccccccgacacggugucgc

SEQ ID NO: 2535 - RNA, 21 nt, Artificial sequence
  Synthetic oligonucleotide
cgagcagggccuguccgccuu

SEQ ID NO: 2536 - RNA, 21 nt, Artificial sequence
  Synthetic oligonucleotide
cccaguccacccgccacgccc

SEQ ID NO: 2537 - RNA, 21 nt, Artificial sequence
  Synthetic oligonucleotide
ggcagcgggggcagugggucu

SEQ ID NO: 2538 - RNA, 21 nt, Artificial sequence
  Synthetic oligonucleotide
ucgagagacgggacuggaguc

SEQ ID NO: 2539 - RNA, 21 nt, Artificial sequence
  Synthetic oligonucleotide
cggacaggcuuggagaaggcg

SEQ ID NO: 2540 - RNA, 21 nt, Artificial sequence
  Synthetic oligonucleotide
ucuaccucuccuacuuugaca

SEQ ID NO: 2541 - RNA, 21 nt, Artificial sequence
  Synthetic oligonucleotide
gcagugcccggucauugacag

SEQ ID NO: 2542 - RNA, 21 nt, Artificial sequence
  Synthetic oligonucleotide
gagccaccugaggagccugag

SEQ ID NO: 2543 - RNA, 21 nt, Artificial sequence
  Synthetic oligonucleotide
cuggggccagcagucgggagg

SEQ ID NO: 2544 - RNA, 21 nt, Artificial sequence
  Synthetic oligonucleotide
cagcugggcagccaaggcccc

SEQ ID NO: 2545 - RNA, 21 nt, Artificial sequence
  Synthetic oligonucleotide
augcuguacccugaggacagc

SEQ ID NO: 2546 - RNA, 21 nt, Artificial sequence
  Synthetic oligonucleotide
cuggacuuggugcccggcggg

SEQ ID NO: 2547 - RNA, 21 nt, Artificial sequence
  Synthetic oligonucleotide
augguggugggcgaagugcuc

SEQ ID NO: 2548 - RNA, 21 nt, Artificial sequence
  Synthetic oligonucleotide
cgcuggagcaggugcagucca

SEQ ID NO: 2549 - RNA, 21 nt, Artificial sequence
  Synthetic oligonucleotide
gcugaccuuggaggagcacuc

SEQ ID NO: 2550 - RNA, 21 nt, Artificial sequence
  Synthetic oligonucleotide
gccaagccccagcgggcagcc

SEQ ID NO: 2551 - RNA, 21 nt, Artificial sequence
  Synthetic oligonucleotide
caaggacaucgagacggccug

SEQ ID NO: 2552 - RNA, 21 nt, Artificial sequence
  Synthetic oligonucleotide
gcaagcugcucaacaucaccg

SEQ ID NO: 2553 - RNA, 21 nt, Artificial sequence
  Synthetic oligonucleotide
gggcaaggccuuccaggagcu

SEQ ID NO: 2554 - RNA, 21 nt, Artificial sequence
  Synthetic oligonucleotide
ccccagcaaugugcagaagug

SEQ ID NO: 2555 - RNA, 21 nt, Artificial sequence
  Synthetic oligonucleotide
caauaccggcugccccccaug

SEQ ID NO: 2556 - RNA, 21 nt, Artificial sequence
  Synthetic oligonucleotide
ggcuccuguggacagagcacc

SEQ ID NO: 2557 - RNA, 21 nt, Artificial sequence
  Synthetic oligonucleotide
gcagaucccauggacuggagc

SEQ ID NO: 2558 - RNA, 21 nt, Artificial sequence
  Synthetic oligonucleotide
uggcgggcaaggagcugugcg

SEQ ID NO: 2559 - RNA, 21 nt, Artificial sequence
  Synthetic oligonucleotide
gccaugucggaggagcaguuc

SEQ ID NO: 2560 - RNA, 21 nt, Artificial sequence
  Synthetic oligonucleotide
ccgccagcgcucgccccuggg

SEQ ID NO: 2561 - RNA, 21 nt, Artificial sequence
  Synthetic oligonucleotide
caccuggacaucuggaaguca

SEQ ID NO: 2562 - RNA, 21 nt, Artificial sequence
  Synthetic oligonucleotide
guggggaugugcugcacgccc

SEQ ID NO: 2563 - RNA, 21 nt, Artificial sequence
  Synthetic oligonucleotide
agcggccuggaugaaagagcg

SEQ ID NO: 2564 - RNA, 21 nt, Artificial sequence
  Synthetic oligonucleotide
ugaggagagcuggaccgacag

SEQ ID NO: 2565 - RNA, 21 nt, Artificial sequence
  Synthetic oligonucleotide
cacuacugugccucgaccagu

SEQ ID NO: 2566 - RNA, 21 nt, Artificial sequence
  Synthetic oligonucleotide
gcgagguggacucaucaugcu

SEQ ID NO: 2567 - RNA, 21 nt, Artificial sequence
  Synthetic oligonucleotide
ggacuucaccuggggcgauuc

SEQ ID NO: 2568 - RNA, 21 nt, Artificial sequence
  Synthetic oligonucleotide
uccgggcagcccauccaccug

SEQ ID NO: 2569 - RNA, 21 nt, Artificial sequence
  Synthetic oligonucleotide
ugcuacucaagccccacagcu

SEQ ID NO: 2570 - RNA, 21 nt, Artificial sequence
  Synthetic oligonucleotide
gcucaacaaggagaagggcau

SEQ ID NO: 2571 - RNA, 21 nt, Artificial sequence
  Synthetic oligonucleotide
gggcauccgcaagaaccgucc

SEQ ID NO: 2572 - RNA, 21 nt, Artificial sequence
  Synthetic oligonucleotide
gcccagguggcccggcugugg

SEQ ID NO: 2573 - RNA, 21 nt, Artificial sequence
  Synthetic oligonucleotide
ucuucaaaauugaggacucag

SEQ ID NO: 2574 - RNA, 21 nt, Artificial sequence
  Synthetic oligonucleotide
guggcaguuccucaaggaguu

SEQ ID NO: 2575 - RNA, 21 nt, Artificial sequence
  Synthetic oligonucleotide
uauggccgcuucauuaggugg

SEQ ID NO: 2576 - RNA, 21 nt, Artificial sequence
  Synthetic oligonucleotide
cugagccgcuccauccgccag

SEQ ID NO: 2577 - RNA, 21 nt, Artificial sequence
  Synthetic oligonucleotide
guauuacaagaagggcaucau

SEQ ID NO: 2578 - RNA, 21 nt, Artificial sequence
  Synthetic oligonucleotide
cgcccucaggggccucucucc

SEQ ID NO: 2579 - RNA, 21 nt, Artificial sequence
  Synthetic oligonucleotide
cagcgccucgucuaccaguuc

SEQ ID NO: 2580 - RNA, 21 nt, Artificial sequence
  Synthetic oligonucleotide
uccggaagccagacaucuccc

SEQ ID NO: 2581 - RNA, 21 nt, Artificial sequence
  Synthetic oligonucleotide
ccgccaugaacuacgacaagc

SEQ ID NO: 2582 - RNA, 21 nt, Artificial sequence
  Synthetic oligonucleotide
cuggcccagggccugaaaccc

SEQ ID NO: 2583 - RNA, 21 nt, Artificial sequence
  Synthetic oligonucleotide
cucugaccuuccagagcccaa

SEQ ID NO: 2584 - RNA, 21 nt, Artificial sequence
  Synthetic oligonucleotide
acgggcagucugcucugcugc

SEQ ID NO: 2585 - RNA, 21 nt, Artificial sequence
  Synthetic oligonucleotide
cugccugcccugccucagcca

SEQ ID NO: 2586 - RNA, 21 nt, Artificial sequence
  Synthetic oligonucleotide
aggcccugagaugggggaaaa

SEQ ID NO: 2587 - RNA, 21 nt, Artificial sequence
  Synthetic oligonucleotide
cgugcaccccaucugagugcc

SEQ ID NO: 2588 - RNA, 21 nt, Artificial sequence
  Synthetic oligonucleotide
aggucagggaggggcaaccaa

SEQ ID NO: 2589 - RNA, 21 nt, Artificial sequence
  Synthetic oligonucleotide
cccuggaggacagagggagac

SEQ ID NO: 2590 - RNA, 21 nt, Artificial sequence
  Synthetic oligonucleotide
cuccucaggcccagcugcucc

SEQ ID NO: 2591 - RNA, 21 nt, Artificial sequence
  Synthetic oligonucleotide
cccuggggcaggggugcuucc

SEQ ID NO: 2592 - RNA, 21 nt, Artificial sequence
  Synthetic oligonucleotide
acugccccagggggauauggg

SEQ ID NO: 2593 - RNA, 21 nt, Artificial sequence
  Synthetic oligonucleotide
guccucuggggccuucgggac

SEQ ID NO: 2594 - RNA, 21 nt, Artificial sequence
  Synthetic oligonucleotide
cagggcugcuccccaacaccu

SEQ ID NO: 2595 - RNA, 21 nt, Artificial sequence
  Synthetic oligonucleotide
ucucugcuccaucccccugcc

SEQ ID NO: 2596 - RNA, 21 nt, Artificial sequence
  Synthetic oligonucleotide
gggcagugacucgacaaaggc

SEQ ID NO: 2597 - RNA, 21 nt, Artificial sequence
  Synthetic oligonucleotide
ccacaggcaguccaggccucu

SEQ ID NO: 2598 - RNA, 21 nt, Artificial sequence
  Synthetic oligonucleotide
ccagagcagagccuacagaag

SEQ ID NO: 2599 - RNA, 21 nt, Artificial sequence
  Synthetic oligonucleotide
ugccucugaccccagcauuuc

SEQ ID NO: 2600 - RNA, 21 nt, Artificial sequence
  Synthetic oligonucleotide
uggcauggugcagggagacau

SEQ ID NO: 2601 - RNA, 21 nt, Artificial sequence
  Synthetic oligonucleotide
auggauaauaaagauacuaga

SEQ ID NO: 2602 - RNA, 21 nt, Artificial sequence
  Synthetic oligonucleotide
ucugcaccccugaguugggca

SEQ ID NO: 2603 - RNA, 21 nt, Artificial sequence
  Synthetic oligonucleotide
agccaggagugcccccgggaa

SEQ ID NO: 2604 - RNA, 21 nt, Artificial sequence
  Synthetic oligonucleotide
cucccauucugcaccacaccu

SEQ ID NO: 2605 - RNA, 21 nt, Artificial sequence
  Synthetic oligonucleotide
cgccaguauuacaagaagggc

SEQ ID NO: 2606 - RNA, 21 nt, Artificial sequence
  Synthetic oligonucleotide
ucuggaagucagcggccugga

SEQ ID NO: 2607 - RNA, 21 nt, Artificial sequence
  Synthetic oligonucleotide
gccccacagcuauggccgcuu

SEQ ID NO: 2608 - RNA, 21 nt, Artificial sequence
  Synthetic oligonucleotide
ccauccgccaguauuacaaga

SEQ ID NO: 2609 - RNA, 21 nt, Artificial sequence
  Synthetic oligonucleotide
gcugucugacuuccucccagc

SEQ ID NO: 2610 - RNA, 21 nt, Artificial sequence
  Synthetic oligonucleotide
gccagcucccugcaagccccu

SEQ ID NO: 2611 - RNA, 21 nt, Artificial sequence
  Synthetic oligonucleotide
uguccacacugccccacagac

SEQ ID NO: 2612 - RNA, 21 nt, Artificial sequence
  Synthetic oligonucleotide
cccaguccuccaagccugcug

SEQ ID NO: 2613 - RNA, 21 nt, Artificial sequence
  Synthetic oligonucleotide
ucagguugggccuugccacgg

SEQ ID NO: 2614 - RNA, 21 nt, Artificial sequence
  Synthetic oligonucleotide
cacauuccugcacucugccgu

SEQ ID NO: 2615 - RNA, 21 nt, Artificial sequence
  Synthetic oligonucleotide
gugccagcaggcagcccuggg

SEQ ID NO: 2616 - RNA, 21 nt, Artificial sequence
  Synthetic oligonucleotide
uggccaaccugagugcugccu

SEQ ID NO: 2617 - RNA, 21 nt, Artificial sequence
  Synthetic oligonucleotide
accucagagggccaccccuug

SEQ ID NO: 2618 - RNA, 21 nt, Artificial sequence
  Synthetic oligonucleotide
uacaggcacgcagcccugaga

SEQ ID NO: 2619 - RNA, 21 nt, Artificial sequence
  Synthetic oligonucleotide
gcuggggguaggggacucccu

SEQ ID NO: 2620 - RNA, 21 nt, Artificial sequence
  Synthetic oligonucleotide
ucugccaccagcccugcuggc

SEQ ID NO: 2621 - RNA, 21 nt, Artificial sequence
  Synthetic oligonucleotide
gaaguuggcacugcagcagac

SEQ ID NO: 2622 - RNA, 21 nt, Artificial sequence
  Synthetic oligonucleotide
cgccaguggccucagcugccc

SEQ ID NO: 2623 - RNA, 21 nt, Artificial sequence
  Synthetic oligonucleotide
ccagaugccuggcugagacac

SEQ ID NO: 2624 - RNA, 21 nt, Artificial sequence
  Synthetic oligonucleotide
ccccugguuccgcuggccccc

SEQ ID NO: 2625 - RNA, 21 nt, Artificial sequence
  Synthetic oligonucleotide
cacaccucuucccggccccug

SEQ ID NO: 2626 - RNA, 21 nt, Artificial sequence
  Synthetic oligonucleotide
cagcucccugggcaccaggca

SEQ ID NO: 2627 - RNA, 21 nt, Artificial sequence
  Synthetic oligonucleotide
ugagcagcguaucccccagcc

SEQ ID NO: 2628 - RNA, 21 nt, Artificial sequence
  Synthetic oligonucleotide
gggcagcgccagcccgggucu

SEQ ID NO: 2629 - RNA, 21 nt, Artificial sequence
  Synthetic oligonucleotide
agcccaaacagcagcggcaug

SEQ ID NO: 2630 - RNA, 21 nt, Artificial sequence
  Synthetic oligonucleotide
agcuaacagacacagccgcca

SEQ ID NO: 2631 - RNA, 21 nt, Artificial sequence
  Synthetic oligonucleotide
caccuccugcugccccccgac

SEQ ID NO: 2632 - RNA, 21 nt, Artificial sequence
  Synthetic oligonucleotide
cacggugucgcggacaggcuu

SEQ ID NO: 2633 - RNA, 21 nt, Artificial sequence
  Synthetic oligonucleotide
ccgccacgcccgagcagggcc

SEQ ID NO: 2634 - RNA, 21 nt, Artificial sequence
  Synthetic oligonucleotide
ggacuggagucccaguccacc

SEQ ID NO: 2635 - RNA, 21 nt, Artificial sequence
  Synthetic oligonucleotide
gcagugggucucgagagacgg

SEQ ID NO: 2636 - RNA, 21 nt, Artificial sequence
  Synthetic oligonucleotide
uggagaaggcggcagcggggg

SEQ ID NO: 2637 - RNA, 21 nt, Artificial sequence
  Synthetic oligonucleotide
cugaggacagcagcugggcag

SEQ ID NO: 2638 - RNA, 21 nt, Artificial sequence
  Synthetic oligonucleotide
aggagccugagcagugcccgg

SEQ ID NO: 2639 - RNA, 21 nt, Artificial sequence
  Synthetic oligonucleotide
gucauugacagccaagcccca

SEQ ID NO: 2640 - RNA, 21 nt, Artificial sequence
  Synthetic oligonucleotide
cagucgggaggagccaccuga

SEQ ID NO: 2641 - RNA, 21 nt, Artificial sequence
  Synthetic oligonucleotide
gccaaggccccuggggccagc

SEQ ID NO: 2642 - RNA, 21 nt, Artificial sequence
  Synthetic oligonucleotide
cuacuuugacaugcuguaccc

SEQ ID NO: 2643 - RNA, 21 nt, Artificial sequence
  Synthetic oligonucleotide
ugcccggcgggcugaccuugg

SEQ ID NO: 2644 - RNA, 21 nt, Artificial sequence
  Synthetic oligonucleotide
gaggagcacucgcuggagcag

SEQ ID NO: 2645 - RNA, 21 nt, Artificial sequence
  Synthetic oligonucleotide
agcgggcagccuggacuuggu

SEQ ID NO: 2646 - RNA, 21 nt, Artificial sequence
  Synthetic oligonucleotide
gcgaagugcucaaggacaucg

SEQ ID NO: 2647 - RNA, 21 nt, Artificial sequence
  Synthetic oligonucleotide
gagacggccugcaagcugcuc

SEQ ID NO: 2648 - RNA, 21 nt, Artificial sequence
  Synthetic oligonucleotide
ggugcaguccauggugguggg

SEQ ID NO: 2649 - RNA, 21 nt, Artificial sequence
  Synthetic oligonucleotide
caacaucaccgcagaucccau

SEQ ID NO: 2650 - RNA, 21 nt, Artificial sequence
  Synthetic oligonucleotide
gugcagaaguggcuccugugg

SEQ ID NO: 2651 - RNA, 21 nt, Artificial sequence
  Synthetic oligonucleotide
uggacuggagccccagcaaug

SEQ ID NO: 2652 - RNA, 21 nt, Artificial sequence
  Synthetic oligonucleotide
uuccaggagcuggcgggcaag

SEQ ID NO: 2653 - RNA, 21 nt, Artificial sequence
  Synthetic oligonucleotide
ugccccccaugggcaaggccu

SEQ ID NO: 2654 - RNA, 21 nt, Artificial sequence
  Synthetic oligonucleotide
gacagagcaccaauaccggcu

SEQ ID NO: 2655 - RNA, 21 nt, Artificial sequence
  Synthetic oligonucleotide
ucgccccuggguggggaugug

SEQ ID NO: 2656 - RNA, 21 nt, Artificial sequence
  Synthetic oligonucleotide
gcugcacgcccaccuggacau

SEQ ID NO: 2657 - RNA, 21 nt, Artificial sequence
  Synthetic oligonucleotide
aggagcaguuccgccagcgcu

SEQ ID NO: 2658 - RNA, 21 nt, Artificial sequence
  Synthetic oligonucleotide
ggagcugugcgccaugucgga

SEQ ID NO: 2659 - RNA, 21 nt, Artificial sequence
  Synthetic oligonucleotide
augaaagagcggacuucaccu

SEQ ID NO: 2660 - RNA, 21 nt, Artificial sequence
  Synthetic oligonucleotide
uggggcgauucacuacugugc

SEQ ID NO: 2661 - RNA, 21 nt, Artificial sequence
  Synthetic oligonucleotide
ccauccaccuguggcaguucc

SEQ ID NO: 2662 - RNA, 21 nt, Artificial sequence
  Synthetic oligonucleotide
cucaaggaguugcuacucaag

SEQ ID NO: 2663 - RNA, 21 nt, Artificial sequence
  Synthetic oligonucleotide
uggaccgacagcgagguggac

SEQ ID NO: 2664 - RNA, 21 nt, Artificial sequence
  Synthetic oligonucleotide
ccucgaccagugaggagagcu

SEQ ID NO: 2665 - RNA, 21 nt, Artificial sequence
  Synthetic oligonucleotide
cucaucaugcuccgggcagcc

SEQ ID NO: 2666 - RNA, 21 nt, Artificial sequence
  Synthetic oligonucleotide
cccggcuguggggcauccgca

SEQ ID NO: 2667 - RNA, 21 nt, Artificial sequence
  Synthetic oligonucleotide
aagaaccgucccgccaugaac

SEQ ID NO: 2668 - RNA, 21 nt, Artificial sequence
  Synthetic oligonucleotide
gagaagggcaucuucaaaauu

SEQ ID NO: 2669 - RNA, 21 nt, Artificial sequence
  Synthetic oligonucleotide
ugaggacucagcccagguggc

SEQ ID NO: 2670 - RNA, 21 nt, Artificial sequence
  Synthetic oligonucleotide
ucauuagguggcucaacaagg

SEQ ID NO: 2671 - RNA, 21 nt, Artificial sequence
  Synthetic oligonucleotide
ucuaccaguucgugcacccca

SEQ ID NO: 2672 - RNA, 21 nt, Artificial sequence
  Synthetic oligonucleotide
agacaucucccagcgccucgu

SEQ ID NO: 2673 - RNA, 21 nt, Artificial sequence
  Synthetic oligonucleotide
aagggcaucauccggaagcca

SEQ ID NO: 2674 - RNA, 21 nt, Artificial sequence
  Synthetic oligonucleotide
cuacgacaagcugagccgcuc

SEQ ID NO: 2675 - RNA, 21 nt, Artificial sequence
  Synthetic oligonucleotide
aucugagugccuggcccaggg

SEQ ID NO: 2676 - RNA, 21 nt, Artificial sequence
  Synthetic oligonucleotide
gccugaaacccgcccucaggg

SEQ ID NO: 2677 - RNA, 21 nt, Artificial sequence
  Synthetic oligonucleotide
ccagagcccaaggucagggag

SEQ ID NO: 2678 - RNA, 21 nt, Artificial sequence
  Synthetic oligonucleotide
ugcucugcugcucugaccuuc

SEQ ID NO: 2679 - RNA, 21 nt, Artificial sequence
  Synthetic oligonucleotide
augggggaaaacgggcagucu

SEQ ID NO: 2680 - RNA, 21 nt, Artificial sequence
  Synthetic oligonucleotide
ugccucagccaggcccugaga

SEQ ID NO: 2681 - RNA, 21 nt, Artificial sequence
  Synthetic oligonucleotide
ggccucucuccugccugcccu

SEQ ID NO: 2682 - RNA, 21 nt, Artificial sequence
  Synthetic oligonucleotide
ggggugcuuccuccucaggcc

SEQ ID NO: 2683 - RNA, 21 nt, Artificial sequence
  Synthetic oligonucleotide
ggggauauggguccucugggg

SEQ ID NO: 2684 - RNA, 21 nt, Artificial sequence
  Synthetic oligonucleotide
cagagggagacagggcugcuc

SEQ ID NO: 2685 - RNA, 21 nt, Artificial sequence
  Synthetic oligonucleotide
ccagcugcuccccuggaggac

SEQ ID NO: 2686 - RNA, 21 nt, Artificial sequence
  Synthetic oligonucleotide
ggggcaaccaacugccccagg

SEQ ID NO: 2687 - RNA, 21 nt, Artificial sequence
  Synthetic oligonucleotide
gccuucgggacccuggggcag

SEQ ID NO: 2688 - RNA, 21 nt, Artificial sequence
  Synthetic oligonucleotide
ccccaacaccugccucugacc

SEQ ID NO: 2689 - RNA, 21 nt, Artificial sequence
  Synthetic oligonucleotide
aucccccugccucccauucug

SEQ ID NO: 2690 - RNA, 21 nt, Artificial sequence
  Synthetic oligonucleotide
uccaggccucucucugcucca

SEQ ID NO: 2691 - RNA, 21 nt, Artificial sequence
  Synthetic oligonucleotide
ucgacaaaggccacaggcagu

SEQ ID NO: 2692 - RNA, 21 nt, Artificial sequence
  Synthetic oligonucleotide
gccuacagaagggcagugacu

SEQ ID NO: 2693 - RNA, 21 nt, Artificial sequence
  Synthetic oligonucleotide
cccagcauuuccagagcagag

SEQ ID NO: 2694 - RNA, 21 nt, Artificial sequence
  Synthetic oligonucleotide
cagggagacaucugcaccccu

SEQ ID NO: 2695 - RNA, 21 nt, Artificial sequence
  Synthetic oligonucleotide
gcaccacaccuggcauggugc

SEQ ID NO: 2696 - RNA, 21 nt, Artificial sequence
  Synthetic oligonucleotide
ugaguugggcagccaggagug

SEQ ID NO: 2697 - RNA, 21 nt, Artificial sequence
  Synthetic oligonucleotide
gcccccgggaauggauaauaa

1. An oligomeric compound comprising a modified oligonucleotide consisting of 16 linked nucleosides having a nucleobase sequence of SEQ ID NO: 1129, wherein the modified oligonucleotide has a sugar motif comprising:
a 5′-region consisting of 3 linked 5′-region nucleosides;
a central region consisting of 10 linked central region nucleosides; and
a 3′-region consisting of 3 linked 3′-region nucleosides,
wherein each of the 5′-region nucleosides and each of the 3′-region nucleosides comprises a cEt sugar moiety; each of the central region nucleosides comprises an unmodified 2′-deoxyribosyl sugar moiety; and each internucleoside linkage is a phosphorothioate linkage.

2. The oligomeric compound of claim 1, comprising a conjugate group.

3. The oligomeric compound of claim 1, wherein the oligomeric compound is single-stranded.

4. A pharmaceutical composition comprising the oligomeric compound of claim 1, and a pharmaceutically acceptable carrier or diluent.

5. The pharmaceutical composition of claim 4, wherein the pharmaceutically acceptable diluent comprises phosphate buffered saline (PBS).

6. The pharmaceutical composition of claim 5, consisting essentially of the oligomeric compound and PBS.

7. A method comprising administering to a subject the oligomeric compound of claim 1.

8. A method of treating a pulmonary condition comprising administering to a subject having or at risk for developing the pulmonary condition a therapeutically effective amount of the oligomeric compound of claim 1, thereby treating the pulmonary condition.

9. The method of claim 8, wherein the pulmonary condition is selected from bronchitis, asthma, chronic obstructive pulmonary disease, pulmonary fibrosis, idiopathic pulmonary fibrosis (IPF), pneumonia, emphysema, rhinitis, sinusitis, nasal polyposis, sinus polyposis, bronchiectasis, and sarcoidosis.

10. The method of claim 8, wherein the pulmonary condition is bronchitis.

11. The method of claim 8, wherein the pulmonary condition is asthma.

12. The method of claim 8, wherein administering comprises inhaling the oligomeric compound.

13. A chirally enriched population of the oligomeric compound of claim 1, wherein the population is enriched for oligomeric compounds having a modified oligonucleotide comprising at least one particular phosphorothioate internucleoside linkage having a particular stereochemical configuration.

14. A modified oligonucleotide according to the following chemical structure: [chemical structure]
or a salt thereof.

15. The modified oligonucleotide of claim 14, which is the sodium salt or the potassium salt.

16. A pharmaceutical composition comprising the modified oligonucleotide of claim 14, and a pharmaceutically acceptable carrier or diluent.

17. The pharmaceutical composition of claim 16, wherein the pharmaceutically acceptable diluent comprises PBS.

18. The pharmaceutical composition of claim 17, consisting essentially of the modified oligonucleotide and PBS.

19. A method comprising administering to a subject the modified oligonucleotide of claim 14.

20. A method of treating a pulmonary condition comprising administering to a subject having or at risk for developing the pulmonary condition a therapeutically effective amount of the modified oligonucleotide of claim 14, thereby treating the pulmonary condition.

21. The method of claim 20, wherein the pulmonary condition is selected from bronchitis, asthma, chronic obstructive pulmonary disease, pulmonary fibrosis, idiopathic pulmonary fibrosis (IPF), pneumonia, emphysema, rhinitis, sinusitis, nasal polyposis, sinus polyposis, bronchiectasis, and sarcoidosis.

22. The method of claim 20, wherein the pulmonary condition is bronchitis.

23. The method of claim 20, wherein the pulmonary condition is asthma.

24. The method of claim 20, wherein administering comprises inhaling the oligomeric compound.

25. A modified oligonucleotide according to the following chemical structure:

[chemical structure]

26. A pharmaceutical composition comprising the modified oligonucleotide of claim 25, and a pharmaceutically acceptable carrier or diluent.

27. The pharmaceutical composition of claim 26, wherein the pharmaceutically acceptable diluent comprises PBS.

28. The pharmaceutical composition of claim 27, consisting essentially of the modified oligonucleotide and PBS.

29. A method comprising administering to a subject the modified oligonucleotide of claim 25.

30. The method of claim 29, wherein administering comprises inhaling the oligomeric compound.
